United States Patent Application Publication US 2026/0274953 A1, published September 17, 2026 (application 19/427,808).

The application's sequence listing, which the Patent Office published only in electronic form, follows.

SEQUENCE LISTING (4796 sequences)

SEQ ID NO: 1 - protein, 127 aa, synthetic construct
DVQLVESGGGVVQPGGSLRLSCAATGFTLDYYVIGWFRQAPGKEREGVACLSSNGDRINYADSVKGRFTISRDIAKNTVYLQMNSLRPEDTALYHCAAGTSTTVRDMCGIMYLYDYWAQGTLVTVSS

SEQ ID NO: 2 - protein, 127 aa, synthetic construct
EVQLVESGGGVVQPGGSLRLSCAASGFTLDYYVIGWFRQAPGKEREGVACLSSEGDRPNYADSVKGRFTISRDIAKNTVDLQMNSLRPEDTALYHCAAGTSTTVRDLCGIMYLYDYWAQGTLVTVSS

SEQ ID NO: 3 - protein, 127 aa, synthetic construct
EVQLVESGGGVVQPGGSLRLSCAASGFTLDYYVLGWFRQAPGKEREGVACLSSEGDRRNYADSVKGRFTISRDIAKNTVSLQMNSLRPEDTALYHCAAGTSTTVRDLCFIMYLYDYWAQGTLVTVSS

SEQ ID NO: 4 - protein, 127 aa, synthetic construct
EVQLVESGGGVVQPGGSLRLSCAASGFTLDYYVYGWFRQAPGKEREGVACLSSEGDRRNYADSVKGRFTISRDIAKNTVSLQMNSLRPEDTALYHCAAGTSTTVRDLCFIMYLYDYWAQGTLVTVSS

SEQ ID NO: 5 - protein, 127 aa, synthetic construct
EVQLVESGGGVVQPGGSLRLSCAASGFTLDYYVFGWFRQAPGKEREGVACLSSEGDRRNYADSVKGRFTISRDIAKNTVSLQMNSLRPEDTALYHCAAGTSTTVRDLCFIMYLYDYWAQGTLVTVSS

SEQ ID NO: 6 - protein, 127 aa, synthetic construct
EVQLVESGGGVVQPGGSLRLSCAASGFTLDYYVIGWFRQAPGKEREGVACLSSEGDRRNYADSVKGRFTISRDIAKNTVSLQMNSLRPEDTALYHCAAGTSTTVRDLCFIMYLYDYWAQGTLVTVSS

SEQ ID NO: 7 - protein, 127 aa, synthetic construct
EVQLVESGGGVVQPGGSLRLSCAASGFTLDYYVLGWFRQAPGKEREGVACLSSEGDRGNYADSVKGRFTISRDIAKNTVSLQMNSLRPEDTALYHCAAGTSTTVRDLCFIMYLYDYWAQGTLVTVSS

SEQ ID NO: 8 - protein, 127 aa, synthetic construct
EVQLVESGGGVVQPGGSLRLSCAASGFTLDYYVYGWFRQAPGKEREGVACLSSEGDRGNYADSVKGRFTISRDIAKNTVSLQMNSLRPEDTALYHCAAGTSTTVRDLCFIMYLYDYWAQGTLVTVSS

SEQ ID NO: 9 - protein, 127 aa, synthetic construct
EVQLVESGGGVVQPGGSLRLSCAASGFTLDYYVFGWFRQAPGKEREGVACLSSEGDRGNYADSVKGRFTISRDIAKNTVSLQMNSLRPEDTALYHCAAGTSTTVRDLCFIMYLYDYWAQGTLVTVSS

SEQ ID NO: 10 - protein, 127 aa, synthetic construct
EVQLVESGGGVVQPGGSLRLSCAASGFTLDYYVIGWFRQAPGKEREGVACLSSEGDRGNYADSVKGRFTISRDIAKNTVSLQMNSLRPEDTALYHCAAGTSTTVRDLCFIMYLYDYWAQGTLVTVSS

SEQ ID NO: 11 - protein, 127 aa, synthetic construct
EVQLVESGGGVVQPGGSLRLSCAASGFTLDYYVLGWFRQAPGKEREGVACLSSEGDRTNYADSVKGRFTISRDIAKNTVSLQMNSLRPEDTALYHCAAGTSTTVRDLCFIMYLYDYWAQGTLVTVSS

SEQ ID NO: 12 - protein, 127 aa, synthetic construct
EVQLVESGGGVVQPGGSLRLSCAASGFTLDYYVYGWFRQAPGKEREGVACLSSEGDRTNYADSVKGRFTISRDIAKNTVSLQMNSLRPEDTALYHCAAGTSTTVRDLCFIMYLYDYWAQGTLVTVSS

SEQ ID NO: 13 - protein, 127 aa, synthetic construct
EVQLVESGGGVVQPGGSLRLSCAASGFTLDYYVFGWFRQAPGKEREGVACLSSEGDRTNYADSVKGRFTISRDIAKNTVSLQMNSLRPEDTALYHCAAGTSTTVRDLCFIMYLYDYWAQGTLVTVSS

SEQ ID NO: 14 - protein, 127 aa, synthetic construct
EVQLVESGGGVVQPGGSLRLSCAASGFTLDYYVIGWFRQAPGKEREGVACLSSEGDRSNYADSVKGRFTISRDIAKNTVDLQMNSLRPEDTALYHCAAGTSTTVRDLCGIMYLYDYWAQGTLVTVSS

SEQ ID NO: 15 - protein, 127 aa, synthetic construct
EVQLVESGGGVVQPGGSLRLSCAASGFTLDYYVIGWFRQAPGKEREGVACLSSEGDRTNYADSVKGRFTISRDIAKNTVSLQMNSLRPEDTALYHCAAGTSTTVRDLCFIMYLYDYWAQGTLVTVSS

SEQ ID NO: 16 - protein, 127 aa, synthetic construct
EVQLVESGGGVVQPGGSLRLSCAASGFTLDYYVYGWFRQAPGKEREGVACLSSEGDRRNYADSVKGRFTISRDIAKNTVDLQMNSLRPEDTALYHCAAGTSTTVRDLCFIMYLYDYWAQGTLVTVSS

SEQ ID NO: 17 - protein, 127 aa, synthetic construct
EVQLVESGGGVVQPGGSLRLSCAASGFTLDYYVFGWFRQAPGKEREGVACLSSEGDRRNYADSVKGRFTISRDIAKNTVDLQMNSLRPEDTALYHCAAGTSTTVRDLCFIMYLYDYWAQGTLVTVSS

SEQ ID NO: 18 - protein, 127 aa, synthetic construct
EVQLVESGGGVVQPGGSLRLSCAASGFTLDYYVIGWFRQAPGKEREGVACLSSEGDRRNYADSVKGRFTISRDIAKNTVDLQMNSLRPEDTALYHCAAGTSTTVRDLCFIMYLYDYWAQGTLVTVSS

SEQ ID NO: 19 - protein, 127 aa, synthetic construct
EVQLVESGGGVVQPGGSLRLSCAASGFTLDYYVLGWFRQAPGKEREGVACLSSEGDRGNYADSVKGRFTISRDIAKNTVDLQMNSLRPEDTALYHCAAGTSTTVRDLCFIMYLYDYWAQGTLVTVSS

SEQ ID NO: 20 - protein, 127 aa, synthetic construct
EVQLVESGGGVVQPGGSLRLSCAASGFTLDYYVYGWFRQAPGKEREGVACLSSEGDRGNYADSVKGRFTISRDIAKNTVDLQMNSLRPEDTALYHCAAGTSTTVRDLCFIMYLYDYWAQGTLVTVSS

SEQ ID NO: 21 - protein, 127 aa, synthetic construct
EVQLVESGGGVVQPGGSLRLSCAASGFTLDYYVFGWFRQAPGKEREGVACLSSEGDRGNYADSVKGRFTISRDIAKNTVDLQMNSLRPEDTALYHCAAGTSTTVRDLCFIMYLYDYWAQGTLVTVSS

SEQ ID NO: 22 - protein, 127 aa, synthetic construct
EVQLVESGGGVVQPGGSLRLSCAASGFTLDYYVIGWFRQAPGKEREGVACLSSEGDRGNYADSVKGRFTISRDIAKNTVDLQMNSLRPEDTALYHCAAGTSTTVRDLCFIMYLYDYWAQGTLVTVSS

SEQ ID NO: 23 - protein, 127 aa, synthetic construct
EVQLVESGGGVVQPGGSLRLSCAASGFTLDYYVLGWFRQAPGKEREGVACLSSEGDRTNYADSVKGRFTISRDIAKNTVDLQMNSLRPEDTALYHCAAGTSTTVRDLCFIMYLYDYWAQGTLVTVSS

SEQ ID NO: 24 - protein, 127 aa, synthetic construct
EVQLVESGGGVVQPGGSLRLSCAASGFTLDYYVYGWFRQAPGKEREGVACLSSEGDRTNYADSVKGRFTISRDIAKNTVDLQMNSLRPEDTALYHCAAGTSTTVRDLCFIMYLYDYWAQGTLVTVSS

SEQ ID NO: 25 - protein, 127 aa, synthetic construct
EVQLVESGGGVVQPGGSLRLSCAASGFTLDYYVFGWFRQAPGKEREGVACLSSEGDRTNYGDSVKGRFTISRDIAKNTVDLQMNSLRPEDTALYHCAAGTSTTVRDLCFIMYLYDYWAQGTLVTVSS

SEQ ID NO: 26 - protein, 127 aa, synthetic construct
EVQLVESGGGVVQPGGSLRLSCAASGFTLDYYVIGWFRQAPGKEREGVACLSSEGDRTNYADSVKGRFTISRDIAKNTVDLQMNSLRPEDTALYHCAAGTSTTVRDLCFIMYLYDYWAQGTLVTVSS

SEQ ID NO: 27 - protein, 127 aa, synthetic construct
EVQLVESGGGVVQPGGSLRLSCAASGFTLDYYVLGWFRQAPGKEREGVACLSSEGDRRNYADSVKGRFTISRDIAKNTVSLQMNSLRPEDTALYHCAAGTSTTVRDLCGIMYLYDYWAQGTLVTVSS

SEQ ID NO: 28 - protein, 127 aa, synthetic construct
EVQLVESGGGVVQPGGSLRLSCAASGFTLDYYVLGWFRQAPGKEREGVACLSSEGDRRNYADSVKGRFTISRDIAKNTVDLQMNSLRPEDTALYHCAAGTSTTVRDLCFIMYLYDYWAQGTLVTVSS

SEQ ID NO: 29 - protein, 127 aa, synthetic construct
EVQLVESGGGVVQPGGSLRLSCAASGFTLDYYVIGWFRQAPGKEREGVACLSSEGDRENYADSVKGRFTISRDIAKNTVDLQMNSLRPEDTALYHCAAGTSTTVRDLCGIMYLYDYWAQGTLVTVSS

SEQ ID NO: 30 - protein, 127 aa, synthetic construct
EVQLVESGGGVVQPGGSLRLSCAASGFTLDYYVIGWFRQAPGKEREGVACLSSEGDRHNYADSVKGRFTISRDIAKNTVDLQMNSLRPEDTALYHCAAGTSTTVRDLCGIMYLYDYWAQGTLVTVSS

SEQ ID NO: 31 - protein, 127 aa, synthetic construct
EVQLVESGGGVVQPGGSLRLSCAASGFTLDYYVIGWFRQAPGKEREGVACLSSEGDRKNYADSVKGRFTISRDIAKNTVDLQMNSLRPEDTALYHCAAGTSTTVRDLCGIMYLYDYWAQGTLVTVSS

SEQ ID NO: 32 - protein, 127 aa, synthetic construct
EVQLVESGGGVVQPGGSLRLSCAASGFTLDYYVIGWFRQAPGKEREGVACLSEEGDRINYADSVKGRFTISRDIAKNTVDLQMNSLRPEDTALYHCAAGTSTTVRDLCGIMYLYDYWAQGTLVTVSS

SEQ ID NO: 33 - protein, 127 aa, synthetic construct
EVQLVESGGGVVQPGGSLRLSCAASGFTLDYYVYGWFRQAPGKEREGVACTSSEGDRINYADSVKGRFTISRDIAKNTVSLQMNSLRPEDTALYHCAAGTSTTVRDLCGIMYLYDYWAQGTLVTVSS

SEQ ID NO: 34 - protein, 127 aa, synthetic construct
EVQLVESGGGVVQPGGSLRLSCAASGFTLDYYVFGWFRQAPGKEREGVACTSSEGDRINYADSVKGRFTISRDIAKNTVSLQMNSLRPEDTALYHCAAGTSTTVRDLCGIMYLYDYWAQGTLVTVSS

SEQ ID NO: 35 - protein, 127 aa, synthetic construct
EVQLVESGGGVVQPGGSLRLSCAASGFTLDYYVIGWFRQAPGKEREGVACTSSEGDRINYADSVKGRFTISRDIAKNTVSLQMNSLRPEDTALYHCAAGTSTTVRDLCGIMYLYDYWAQGTLVTVSS

SEQ ID NO: 36 - protein, 127 aa, synthetic construct
EVQLVESGGGVVQPGGSLRLSCAASGFTLDYYVLGWFRQAPGKEREGVACSSSEGDRINYADSVKGRFTISRDIAKNTVSLQMNSLRPEDTALYHCAAGTSTTVRDLCGIMYLYDYWAQGTLVTVSS

SEQ ID NO: 37 - protein, 127 aa, synthetic construct
EVQLVESGGGVVQPGGSLRLSCAASGFTLDYYVYGWFRQAPGKEREGVACSSSEGDRINYADSVKGRFTISRDIAKNTVSLQMNSLRPEDTALYHCAAGTSTTVRDLCGIMYLYDYWAQGTLVTVSS

SEQ ID NO: 38 - protein, 127 aa, synthetic construct
EVQLVESGGGVVQPGGSLRLSCAASGFTLDYYVFGWFRQAPGKEREGVACSSSEGDRINYADSVKGRFTISRDIAKNTVSLQMNSLRPEDTALYHCAAGTSTTVRDLCGIMYLYDYWAQGTLVTVSS

SEQ ID NO: 39 - protein, 127 aa, synthetic construct
EVQLVESGGGVVQPGGSLRLSCAASGFTLDYYVIGWFRQAPGKEREGVACSSSEGDRINYADSVKGRFTISRDIAKNTVSLQMNSLRPEDTALYHCAAGTSTTVRDLCGIMYLYDYWAQGTLVTVSS

SEQ ID NO: 40 - protein, 127 aa, synthetic construct
EVQLVESGGGVVQPGGSLRLSCAASGFTLDYYVLGWFRQAPGKEREGVACLSSEGDRINYADSVKGRFTISRDIAKNTVSLQMNSLRPEDTALYHCAAGTSTTVRDLCGIMYLYDYWAQGTLVTVSS

SEQ ID NO: 41 - protein, 127 aa, synthetic construct
EVQLVESGGGVVQPGGSLRLSCAASGFTLDYYVFGWFRQAPGKEREGVACLSSEGDRINYADSVKGRFTISRDIAKNTVSLQMNSLRPEDTALYHCAAGTSTTVRDLCGIMYLYDYWAQGTLVTVSS

SEQ ID NO: 42 - protein, 127 aa, synthetic construct
EVQLVESGGGVVQPGGSLRLSCAASGFTLDYYVIGWFRQAPGKEREGVACLSSEGDRINYADSVKGRFTISRDIAKNTVSLQMNSLRPEDTALYHCAAGTSTTVRDLCGIMYLYDYWAQGTLVTVSS

SEQ ID NO: 43 - protein, 127 aa, synthetic construct
EVQLVESGGGVVQPGGSLRLSCAASGFTLDYYVLGWFRQAPGKEREGVACTSSEGDRINYADSVKGRFTISRDIAKNTVDLQMNSLRPEDTALYHCAAGTSTTVRDLCGIMYLYDYWAQGTLVTVSS

SEQ ID NO: 44 - protein, 127 aa, synthetic construct
EVQLVESGGGVVQPGGSLRLSCAASGFTLDYYVYGWFRQAPGKEREGVACTSSEGDRINYADSVKGRFTISRDIAKNTVDLQMNSLRPEDTALYHCAAGTSTTVRDLCGIMYLYDYWAQGTLVTVSS

SEQ ID NO: 45 - protein, 127 aa, synthetic construct
EVQLVESGGGVVQPGGSLRLSCAASGFTLDYYVFGWFRQAPGKEREGVACTSSEGDRINYADSVKGRFTISRDIAKNTVDLQMNSLRPEDTALYHCAAGTSTTVRDLCGIMYLYDYWAQGTLVTVSS

SEQ ID NO: 46 - protein, 127 aa, synthetic construct
EVQLVESGGGVVQPGGSLRLSCAASGFTLDYYVLGWFRQAPGKEREGVACSSSEGDRINYADSVKGRFTISRDIAKNTVDLQMNSLRPEDTALYHCAAGTSTTVRDLCGIMYLYDYWAQGTLVTVSS

SEQ ID NO: 47 - protein, 127 aa, synthetic construct
EVQLVESGGGVVQPGGSLRLSCAASGFTLDYYVYGWFRQAPGKEREGVACSSSEGDRINYADSVKGRFTISRDIAKNTVDLQMNSLRPEDTALYHCAAGTSTTVRDLCGIMYLYDYWAQGTLVTVSS

SEQ ID NO: 48 - protein, 127 aa, synthetic construct
EVQLVESGGGVVQPGGSLRLSCAASGFTLDYYVFGWFRQAPGKEREGVACSSSEGDRINYADSVKGRFTISRDIAKNTVDLQMNSLRPEDTALYHCAAGTSTTVRDLCGIMYLYDYWAQGTLVTVSS

SEQ ID NO: 49 - protein, 127 aa, synthetic construct
EVQLVESGGGVVQPGGSLRLSCAASGFTLDYYVIGWFRQAPGKEREGVACSSSEGDRINYADSVKGRFTISRDIAKNTVDLQMNSLRPEDTALYHCAAGTSTTVRDLCGIMYLYDYWAQGTLVTVSS

SEQ ID NO: 50 - protein, 127 aa, synthetic construct
EVQLVESGGGVVQPGGSLRLSCAASGFTLDYYVLGWFRQAPGKEREGVACLSSEGDRINYADSVKGRFTISRDIAKNTVDLQMNSLRPEDTALYHCAAGTSTTVRDLCGIMYLYDYWAQGTLVTVSS

SEQ ID NO: 51 - protein, 127 aa, synthetic construct
EVQLVESGGGVVQPGGSLRLSCAASGFTLDYYVYGWFRQAPGKEREGVACLSSEGDRINYADSVKGRFTISRDIAKNTVDLQMNSLRPEDTALYHCAAGTSTTVRDLCGIMYLYDYWAQGTLVTVSS

SEQ ID NO: 52 - protein, 127 aa, synthetic construct
EVQLVESGGGVVQPGGSLRLSCAASGFTLDYYVFGWFRQAPGKEREGVACLSSEGDRINYADSVKGRFTISRDIAKNTVDLQMNSLRPEDTALYHCAAGTSTTVRDLCGIMYLYDYWAQGTLVTVSS

SEQ ID NO: 53 - protein, 127 aa, synthetic construct
EVQLVESGGGVVQPGGSLRLSCAASGFTLDYYVIGWFRQAPGKEREGVACLSSEGDRINYADSVKGRFTISRDIAKNTVDLQMNSLRPEDTALYHCAAGTSTTVRDLCGIMYLYDYWAQGTLVTVSS

SEQ ID NO: 54 - protein, 127 aa, synthetic construct
EVQLVESGGGVVQPGGSLRLSCAASGFTLDYYVIGWFRQAPGKEREGVACLSSEGDRKNYADSVKGRFTISRDIAKNTVSLQMNSLRPEDTALYHCAAGTSTTVRDLCGIMYLYDYWAQGTLVTVSS

SEQ ID NO: 55 - protein, 127 aa, synthetic construct
EVQLVESGGGVVQPGGSLRLSCAASGFTLDYYVIGWFRQAPGKEREGVACLSSEGDRHNYADSVKGRFTISRDIAKNTVSLQMNSLRPEDTALYHCAAGTSTTVRDLCGIMYLYDYWAQGTLVTVSS

SEQ ID NO: 56 - protein, 127 aa, synthetic construct
EVQLVESGGGVVQPGGSLRLSCAASGFTLDYYVIGWFRQAPGKEREGVACLSSEGDRENYADSVKGRFTISRDIAKNTVSLQMNSLRPEDTALYHCAAGTSTTVRDLCGIMYLYDYWAQGTLVTVSS

SEQ ID NO: 57 - protein, 127 aa, synthetic construct
EVQLVESGGGVVQPGGSLRLSCAASGFTLDYYVIGWFRQAPGKEREGVACLSSEGDRSNYADSVKGRFTISRDIAKNTVSLQMNSLRPEDTALYHCAAGTSTTVRDLCGIMYLYDYWAQGTLVTVSS

SEQ ID NO: 58 - protein, 127 aa, synthetic construct
EVQLVESGGGVVQPGGSLRLSCAASGFTLDYYVIGWFRQAPGKEREGVACLSSEGDRPNYADSVKGRFTISRDIAKNTVSLQMNSLRPEDTALYHCAAGTSTTVRDLCGIMYLYDYWAQGTLVTVSS

SEQ ID NO: 59 - protein, 127 aa, synthetic construct
EVQLVESGGGVVQPGGSLRLSCAASGFTLDYYVYGWFRQAPGKEREGVACLSSEGDRRNYADSVKGRFTISRDIAKNTVSLQMNSLRPEDTALYHCAAGTSTTVRDLCGIMYLYDYWAQGTLVTVSS

SEQ ID NO: 60 - protein, 127 aa, synthetic construct
EVQLVESGGGVVQPGGSLRLSCAASGFTLDYYVIGWFRQAPGKEREGVACLSQEGDRINYADSVKGRFTISRDIAKNTVDLQMNSLRPEDTALYHCAAGTSTTVRDLCGIMYLYDYWAQGTLVTVSS

SEQ ID NO: 61 - protein, 127 aa, synthetic construct
EVQLVESGGGVVQPGGSLRLSCAASGFTLDYYVFGWFRQAPGKEREGVACLSSEGDRRNYADSVKGRFTISRDIAKNTVSLQMNSLRPEDTALYHCAAGTSTTVRDLCGIMYLYDYWAQGTLVTVSS

SEQ ID NO: 62 - protein, 127 aa, synthetic construct
EVQLVESGGGVVQPGGSLRLSCAASGFTLDYYVLGWFRQAPGKEREGVACLSSEGDRGNYADSVKGRFTISRDIAKNTVSLQMNSLRPEDTALYHCAAGTSTTVRDLCGIMYLYDYWAQGTLVTVSS

SEQ ID NO: 63 - protein, 127 aa, synthetic construct
EVQLVESGGGVVQPGGSLRLSCAASGFTLDYYVFGWFRQAPGKEREGVACLSGEGDRINYADSVKGRFTISRDIAKNTVDLQMNSLRPEDTALYHCAAGTSTTVRDLCFIMYLYDYWAQGTLVTVSS

SEQ ID NO: 64 - protein, 127 aa, synthetic construct
EVQLVESGGGVVQPGGSLRLSCAASGFTLDYYVIGWFRQAPGKEREGVACLSGEGDRINYADSVKGRFTISRDIAKNTVDLQMNSLRPEDTALYHCAAGTSTTVRDLCFIMYLYDYWAQGTLVTVSS

SEQ ID NO: 65 - protein, 127 aa, synthetic construct
EVQLVESGGGVVQPGGSLRLSCAASGFTLDYYVLGWFRQAPGKEREGVACLSPEGDRINYADSVKGRFTISRDIAKNTVSLQMNSLRPEDTALYHCAAGTSTTVRDLCGIMYLYDYWAQGTLVTVSS

SEQ ID NO: 66 - protein, 127 aa, synthetic construct
EVQLVESGGGVVQPGGSLRLSCAASGFTLDYYVYGWFRQAPGKEREGVACLSPEGDRINYADSVKGRFTISRDIAKNTVSLQMNSLRPEDTALYHCAAGTSTTVRDLCGIMYLYDYWAQGTLVTVSS

SEQ ID NO: 67 - protein, 127 aa, synthetic construct
EVQLVESGGGVVQPGGSLRLSCAASGFTLDYYVFGWFRQAPGKEREGVACLSPEGDRINYADSVKGRFTISRDIAKNTVSLQMNSLRPEDTALYHCAAGTSTTVRDLCGIMYLYDYWAQGTLVTVSS

SEQ ID NO: 68 - protein, 127 aa, synthetic construct
EVQLVESGGGVVQPGGSLRLSCAASGFTLDYYVLGWFRQAPGKEREGVACLSGEGDRINYADSVKGRFTISRDIAKNTVSLQMNSLRPEDTALYHCAAGTSTTVRDLCGIMYLYDYWAQGTLVTVSS

SEQ ID NO: 69 - protein, 127 aa, synthetic construct
EVQLVESGGGVVQPGGSLRLSCAASGFTLDYYVYGWFRQAPGKEREGVACLSGEGDRINYADSVKGRFTISRDIAKNTVSLQMNSLRPEDTALYHCAAGTSTTVRDLCGIMYLYDYWAQGTLVTVSS

SEQ ID NO: 70 - protein, 127 aa, synthetic construct
EVQLVESGGGVVQPGGSLRLSCAASGFTLDYYVFGWFRQAPGKEREGVACLSGEGDRINYADSVKGRFTISRDIAKNTVSLQMNSLRPEDTALYHCAAGTSTTVRDLCGIMYLYDYWAQGTLVTVSS

SEQ ID NO: 71 - protein, 127 aa, synthetic construct
EVQLVESGGGVVQPGGSLRLSCAASGFTLDYYVIGWFRQAPGKEREGVACLSGEGDRINYADSVKGRFTISRDIAKNTVSLQMNSLRPEDTALYHCAAGTSTTVRDLCGIMYLYDYWAQGTLVTVSS

SEQ ID NO: 72 - protein, 127 aa, synthetic construct
EVQLVESGGGVVQPGGSLRLSCAASGFTLDYYVLGWFRQAPGKEREGVACLSPEGDRINYADSVKGRFTISRDIAKNTVDLQMNSLRPEDTALYHCAAGTSTTVRDLCGIMYLYDYWAQGTLVTVSS

SEQ ID NO: 73 - protein, 127 aa, synthetic construct
EVQLVESGGGVVQPGGSLRLSCAASGFTLDYYVYGWFRQAPGKEREGVACLSPEGDRINYADSVKGRFTISRDIAKNTVDLQMNSLRPEDTALYHCAAGTSTTVRDLCGIMYLYDYWAQGTLVTVSS

SEQ ID NO: 74 - protein, 127 aa, synthetic construct
EVQLVESGGGVVQPGGSLRLSCAASGFTLDYYVFGWFRQAPGKEREGVACLSPEGDRINYADSVKGRFTISRDIAKNTVDLQMNSLRPEDTALYHCAAGTSTTVRDLCGIMYLYDYWAQGTLVTVSS

SEQ ID NO: 75 - protein, 127 aa, synthetic construct
EVQLVESGGGVVQPGGSLRLSCAASGFTLDYYVYGWFRQAPGKEREGVACLSGEGDRINYADSVKGRFTISRDIAKNTVDLQMNSLRPEDTALYHCAAGTSTTVRDLCFIMYLYDYWAQGTLVTVSS

SEQ ID NO: 76 - protein, 127 aa, synthetic construct
EVQLVESGGGVVQPGGSLRLSCAASGFTLDYYVLGWFRQAPGKEREGVACLSGEGDRINYADSVKGRFTISRDIAKNTVDLQMNSLRPEDTALYHCAAGTSTTVRDLCGIMYLYDYWAQGTLVTVSS

SEQ ID NO: 77 - protein, 127 aa, synthetic construct
EVQLVESGGGVVQPGGSLRLSCAASGFTLDYYVIGWFRQAPGKEREGVACLSGEGDRINYADSVKGRFTISRDIAKNTVDLQMNSLRPEDTALYHCAAGTSTTVRDLCGIMYLYDYWAQGTLVTVSS

SEQ ID NO: 78 - protein, 127 aa, synthetic construct
EVQLVESGGGVVQPGGSLRLSCAASGFTLDYYVIGWFRQAPGKEREGVACKSSEGDRINYADSVKGRFTISRDIAKNTVSLQMNSLRPEDTALYHCAAGTSTTVRDLCGIMYLYDYWAQGTLVTVSS

SEQ ID NO: 79 - protein, 127 aa, synthetic construct
EVQLVESGGGVVQPGGSLRLSCAASGFTLDYYVIGWFRQAPGKEREGVACRSSEGDRINYADSVKGRFTISRDIAKNTVSLQMNSLRPEDTALYHCAAGTSTTVRDLCGIMYLYDYWAQGTLVTVSS

SEQ ID NO: 80 - protein, 127 aa, synthetic construct
EVQLVESGGGVVQPGGSLRLSCAASGFTLDYYVIGWFRQAPGKEREGVACGSSEGDRINYADSVKGRFTISRDIAKNTVSLQMNSLRPEDTALYHCAAGTSTTVRDLCGIMYLYDYWAQGTLVTVSS

SEQ ID NO: 81 - protein, 127 aa, synthetic construct
EVQLVESGGGVVQPGGSLRLSCAASGFTLDYYVIGWFRQAPGKEREGVACKSSEGDRINYADSVKGRFTISRDIAKNTVDLQMNSLRPEDTALYHCAAGTSTTVRDLCGIMYLYDYWAQGTLVTVSS

SEQ ID NO: 82 - protein, 127 aa, synthetic construct
EVQLVESGGGVVQPGGSLRLSCAASGFTLDYYVIGWFRQAPGKEREGVACRSSEGDRINYADSVKGRFTISRDIAKNTVDLQMNSLRPEDTALYHCAAGTSTTVRDLCGIMYLYDYWAQGTLVTVSS

SEQ ID NO: 83 - protein, 127 aa, synthetic construct
EVQLVESGGGVVQPGGSLRLSCAASGFTLDYYVIGWFRQAPGKEREGVACHSSEGDRINYADSVKGRFTISRDIAKNTVDLQMNSLRPEDTALYHCAAGTSTTVRDLCGIMYLYDYWAQGTLVTVSS

SEQ ID NO: 84 - protein, 127 aa, synthetic construct
EVQLVESGGGVVQPGGSLRLSCAASGFTLDYYVIGWFRQAPGKEREGVACGSSEGDRINYADSVKGRFTISRDIAKNTVDLQMNSLRPEDTALYHCAAGTSTTVRDLCGIMYLYDYWAQGTLVTVSS

SEQ ID NO: 85 - protein, 127 aa, synthetic construct
EVQLVESGGGVVQPGGSLRLSCAASGFTLDYYVIGWFRQAPGKEREGVACPSSEGDRINYADSVKGRFTISRDIAKNTVDLQMNSLRPEDTALYHCAAGTSTTVRDLCGIMYLYDYWAQGTLVTVSS

SEQ ID NO: 86 - protein, 127 aa, synthetic construct
EVQLVESGGGVVQPGGSLRLSCAASGFTLDYYVIGWFRQAPGKEREGVACLSHEGDRINYADSVKGRFTISRDIAKNTVSLQMNSLRPEDTALYHCAAGTSTTVRDLCGIMYLYDYWAQGTLVTVSS

SEQ ID NO: 87 - protein, 127 aa, synthetic construct
EVQLVESGGGVVQPGGSLRLSCAASGFTLDYYVIGWFRQAPGKEREGVACLSPEGDRINYADSVKGRFTISRDIAKNTVSLQMNSLRPEDTALYHCAAGTSTTVRDLCGIMYLYDYWAQGTLVTVSS

SEQ ID NO: 88 - protein, 127 aa, synthetic construct
EVQLVESGGGVVQPGGSLRLSCAASGFTLDYYVIGWFRQAPGKEREGVACLSQEGDRINYADSVKGRFTISRDIAKNTVSLQMNSLRPEDTALYHCAAGTSTTVRDLCGIMYLYDYWAQGTLVTVSS

SEQ ID NO: 89 - protein, 127 aa, synthetic construct
EVQLVESGGGVVQPGGSLRLSCAASGFTLDYYVYGWFRQAPGKEREGVACLSGEGDRINYADSVKGRFTISRDIAKNTVDLQMNSLRPEDTALYHCAAGTSTTVRDLCGIMYLYDYWAQGTLVTVSS

SEQ ID NO: 90 - protein, 127 aa, synthetic construct
EVQLVESGGGVVQPGGSLRLSCAASGFTLDYYVLGWFRQAPGKEREGVACLSGEGDRINYADSVKGRFTISRDIAKNTVDLQMNSLRPEDTALYHCAAGTSTTVRDLCFIMYLYDYWAQGTLVTVSS

SEQ ID NO: 91 - protein, 127 aa, synthetic construct
EVQLVESGGGVVQPGGSLRLSCAASGFTLDYYVIGWFRQAPGKEREGVACLSPEGDRINYADSVKGRFTISRDIAKNTVDLQMNSLRPEDTALYHCAAGTSTTVRDLCFIMYLYDYWAQGTLVTVSS

SEQ ID NO: 92 - protein, 127 aa, synthetic construct
EVQLVESGGGVVQPGGSLRLSCAASGFTLDYYVFGWFRQAPGKEREGVACLSPEGDRINYADSVKGRFTISRDIAKNTVDLQMNSLRPEDTALYHCAAGTSTTVRDLCFIMYLYDYWAQGTLVTVSS

SEQ ID NO: 93 - protein, 127 aa, synthetic construct
EVQLVESGGGVVQPGGSLRLSCAASGFTLDYYVYGWFRQAPGKEREGVACLSSEGDRGNYADSVKGRFTISRDIAKNTVSLQMNSLRPEDTALYHCAAGTSTTVRDLCGIMYLYDYWAQGTLVTVSS

SEQ ID NO: 94 - protein, 127 aa, synthetic construct
EVQLVESGGGVVQPGGSLRLSCAASGFTLDYYVFGWFRQAPGKEREGVACLSSEGDRGNYADSVKGRFTISRDIAKNTVSLQMNSLRPEDTALYHCAAGTSTTVRDLCGIMYLYDYWAQGTLVTVSS

SEQ ID NO: 95 - protein, 127 aa, synthetic construct
EVQLVESGGGVVQPGGSLRLSCAASGFTLDYYVIGWFRQAPGKEREGVACLSSEGDRGNYADSVKGRFTISRDIAKNTVSLQMNSLRPEDTALYHCAAGTSTTVRDLCGIMYLYDYWAQGTLVTVSS

SEQ ID NO: 96 - protein, 127 aa, synthetic construct
EVQLVESGGGVVQPGGSLRLSCAASGFTLDYYVLGWFRQAPGKEREGVACLSSEGDRTNYADSVKGRFTISRDIAKNTVSLQMNSLRPEDTALYHCAAGTSTTVRDLCGIMYLYDYWAQGTLVTVSS

SEQ ID NO: 97 - protein, 127 aa, synthetic construct
EVQLVESGGGVVQPGGSLRLSCAASGFTLDYYVFGWFRQAPGKEREGVACLSSEGDRTNYADSVKGRFTISRDIAKNTVSLQMNSLRPEDTALYHCAAGTSTTVRDLCGIMYLYDYWAQGTLVTVSS

SEQ ID NO: 98 - protein, 127 aa, synthetic construct
EVQLVESGGGVVQPGGSLRLSCAASGFTLDYYVIGWFRQAPGKEREGVACLSSEGDRTNYADSVKGRFTISRDIAKNTVSLQMNSLRPEDTALYHCAAGTSTTVRDLCGIMYLYDYWAQGTLVTVSS

SEQ ID NO: 99 - protein, 127 aa, synthetic construct
EVQLVESGGGVVQPGGSLRLSCAASGFTLDYYVLGWFRQAPGKEREGVACLSSEGDRRNYADSVKGRFTISRDIAKNTVDLQMNSLRPEDTALYHCAAGTSTTVRDLCGIMYLYDYWAQGTLVTVSS

SEQ ID NO: 100 - protein, 127 aa, synthetic construct
EVQLVESGGGVVQPGGSLRLSCAASGFTLDYYVYGWFRQAPGKEREGVACLSSEGDRRNYADSVKGRFTISRDIAKNTVDLQMNSLRPEDTALYHCAAGTSTTVRDLCGIMYLYDYWAQGTLVTVSS

SEQ ID NO: 101 - protein, 127 aa, synthetic construct
EVQLVESGGGVVQPGGSLRLSCAASGFTLDYYVFGWFRQAPGKEREGVACLSSEGDRRNYADSVKGRFTISRDIAKNTVDLQMNSLRPEDTALYHCAAGTSTTVRDLCGIMYLYDYWAQGTLVTVSS

SEQ ID NO: 102 - protein, 127 aa, synthetic construct
EVQLVESGGGVVQPGGSLRLSCAASGFTLDYYVIGWFRQAPGKEREGVACLSSEGDRRNYADSVKGRFTISRDIAKNTVDLQMNSLRPEDTALYHCAAGTSTTVRDLCGIMYLYDYWAQGTLVTVSS

SEQ ID NO: 103 - protein, 127 aa, synthetic construct
EVQLVESGGGVVQPGGSLRLSCAASGFTLDYYVLGWFRQAPGKEREGVACLSSEGDRGNYADSVKGRFTISRDIAKNTVDLQMNSLRPEDTALYHCAAGTSTTVRDLCGIMYLYDYWAQGTLVTVSS

SEQ ID NO: 104 - protein, 127 aa, synthetic construct
EVQLVESGGGVVQPGGSLRLSCAASGFTLDYYVFGWFRQAPGKEREGVACLSSEGDRGNYADSVKGRFTISRDIAKNTVDLQMNSLRPEDTALYHCAAGTSTTVRDLCGIMYLYDYWAQGTLVTVSS

SEQ ID NO: 105 - protein, 127 aa, synthetic construct
EVQLVESGGGVVQPGGSLRLSCAASGFTLDYYVIGWFRQAPGKEREGVACLSSEGDRGNYADSVKGRFTISRDIAKNTVDLQMNSLRPEDTALYHCAAGTSTTVRDLCGIMYLYDYWAQGTLVTVSS

SEQ ID NO: 106 - protein, 127 aa, synthetic construct
EVQLVESGGGVVQPGGSLRLSCAASGFTLDYYVLGWFRQAPGKEREGVACLSSEGDRTNYADSVKGRFTISRDIAKNTVDLQMNSLRPEDTALYHCAAGTSTTVRDLCGIMYLYDYWAQGTLVTVSS

SEQ ID NO: 107 - protein, 127 aa, synthetic construct
EVQLVESGGGVVQPGGSLRLSCAASGFTLDYYVYGWFRQAPGKEREGVACLSSEGDRTNYADSVKGRFTISRDIAKNTVDLQMNSLRPEDTALYHCAAGTSTTVRDLCGIMYLYDYWAQGTLVTVSS

SEQ ID NO: 108 - protein, 127 aa, synthetic construct
EVQLVESGGGVVQPGGSLRLSCAASGFTLDYYVFGWFRQAPGKEREGVACLSSEGDRTNYADSVKGRFTISRDIAKNTVDLQMNSLRPEDTALYHCAAGTSTTVRDLCGIMYLYDYWAQGTLVTVSS

SEQ ID NO: 109 - protein, 127 aa, synthetic construct
EVQLVESGGGVVQPGGSLRLSCAASGFTLDYYVIGWFRQAPGKEREGVACLSSEGDRTNYADSVKGRFTISRDIAKNTVDLQMNSLRPEDTALYHCAAGTSTTVRDLCGIMYLYDYWAQGTLVTVSS

SEQ ID NO: 110 - protein, 127 aa, synthetic construct
EVQLVESGGGVVQPGGSLRLSCAASGFTLDYYVLGWFRQAPGKEREGVACLSPEGDRINYADSVKGRFTISRDIAKNTVSLQMNSLRPEDTALYHCAAGTSTTVRDLCFIMYLYDYWAQGTLVTVSS

SEQ ID NO: 111 - protein, 127 aa, synthetic construct
EVQLVESGGGVVQPGGSLRLSCAASGFTLDYYVYGWFRQAPGKEREGVACLSPEGDRINYADSVKGRFTISRDIAKNTVSLQMNSLRPEDTALYHCAAGTSTTVRDLCFIMYLYDYWAQGTLVTVSS

SEQ ID NO: 112 - protein, 127 aa, synthetic construct
EVQLVESGGGVVQPGGSLRLSCAASGFTLDYYVFGWFRQAPGKEREGVACLSPEGDRINYADSVKGRFTISRDIAKNTVSLQMNSLRPEDTALYHCAAGTSTTVRDLCFIMYLYDYWAQGTLVTVSS

SEQ ID NO: 113 - protein, 127 aa, synthetic construct
EVQLVESGGGVVQPGGSLRLSCAASGFTLDYYVIGWFRQAPGKEREGVACLSPEGDRINYADSVKGRFTISRDIAKNTVSLQMNSLRPEDTALYHCAAGTSTTVRDLCFIMYLYDYWAQGTLVTVSS

SEQ ID NO: 114 - protein, 127 aa, synthetic construct
EVQLVESGGGVVQPGGSLRLSCAASGFTLDYYVLGWFRQAPGKEREGVACLSGEGDRINYADSVKGRFTISRDIAKNTVSLQMNSLRPEDTALYHCAAGTSTTVRDLCFIMYLYDYWAQGTLVTVSS

SEQ ID NO: 115 - protein, 127 aa, synthetic construct
EVQLVESGGGVVQPGGSLRLSCAASGFTLDYYVYGWFRQAPGKEREGVACLSGEGDRINYADSVKGRFTISRDIAKNTVSLQMNSLRPEDTALYHCAAGTSTTVRDLCFIMYLYDYWAQGTLVTVSS

SEQ ID NO: 116 - protein, 127 aa, synthetic construct
EVQLVESGGGVVQPGGSLRLSCAASGFTLDYYVFGWFRQAPGKEREGVACLSGEGDRINYADSVKGRFTISRDIAKNTVSLQMNSLRPEDTALYHCAAGTSTTVRDLCFIMYLYDYWAQGTLVTVSS

SEQ ID NO: 117 - protein, 127 aa, synthetic construct
EVQLVESGGGVVQPGGSLRLSCAASGFTLDYYVIGWFRQAPGKEREGVACLSGEGDRINYADSVKGRFTISRDIAKNTVSLQMNSLRPEDTALYHCAAGTSTTVRDLCFIMYLYDYWAQGTLVTVSS

SEQ ID NO: 118 - protein, 127 aa, synthetic construct
EVQLVESGGGVVQPGGSLRLSCAASGFTLDYYVLGWFRQAPGKEREGVACLSPEGDRINYADSVKGRFTISRDIAKNTVDLQMNSLRPEDTALYHCAAGTSTTVRDLCFIMYLYDYWAQGTLVTVSS

SEQ ID NO: 119 - protein, 127 aa, synthetic construct
EVQLVESGGGVVQPGGSLRLSCAASGFTLDYYVYGWFRQAPGKEREGVACLSPEGDRINYADSVKGRFTISRDIAKNTVDLQMNSLRPEDTALYHCAAGTSTTVRDLCFIMYLYDYWAQGTLVTVSS

SEQ ID NO: 120 - protein, 127 aa, synthetic construct
EVQLVESGGGVVQPGGSLRLSCAASGFTLDYYVIGWFRQAPGKEREGVACLSSEGDRRNYADSVKGRFTISRDIAKNTVSLQMNSLRPEDTALYHCAAGTSTTVRDLCGIMYLYDYWAQGTLVTVSS

SEQ ID NO: 121 - protein, 127 aa, synthetic construct
EVQLVESGGGVVQPGGSLRLSCAASGFTLDYYVIGWFRQAPGKEREGVACLSPEGDRINYADSVKGRFTISRDIAKNTVDLQMNSLRPEDTALYHCAAGTSTTVRDLCGIMYLYDYWAQGTLVTVSS

SEQ ID NO: 122 - protein, 127 aa, synthetic construct
EVQLVESGGGVVQPGGSLRLSCAASGFTLDYYVLGWFRQAPGKEREGVACTSSEGDRINYADSVKGRFTISRDIAKNTVSLQMNSLRPEDTALYHCAAGTSTTVRDLCGIMYLYDYWAQGTLVTVSS

SEQ ID NO: 123 - protein, 127 aa, synthetic construct
EVQLVESGGGVVQPGGSLRLSCAASGFTLDYYVLGWFRQAPGKEREGVACLSSEGDRINYADSVKGRFTISRDIAKNTVSLQMNSLRPEDTALYHCAAGTSTTVRDLCFIMYLYDYWAQGTLVTVSS

SEQ ID NO: 124 - protein, 127 aa, synthetic construct
EVQLVESGGGVVQPGGSLRLSCAASGFTLDYYVIGWFRQAPGKEREGVACLSSNGDRTNYADSVKGRFTISRDIAKNTVYLQMNSLRPEDTALYHCAAGTSTTVRDVCGIMYLYDYWAQGTLVTVSS

SEQ ID NO: 125 - protein, 127 aa, synthetic construct
EVQLVESGGGVVQPGGSLRLSCAASGFTLDYYVIGWFRQAPGKEREGVACLSSNGDRTNYADSVKGRFTISRDIAKNTVSLQMNSLRPEDTALYHCAAGTSTTVRDTCGIMYLYDYWAQGTLVTVSS

SEQ ID NO: 126 - protein, 127 aa, synthetic construct
EVQLVESGGGVVQPGGSLRLSCAASGFTLDYYVIGWFRQAPGKEREGVACLSSNGDRTNYADSVKGRFTISRDIAKNTVSLQMNSLRPEDTALYHCAAGTSTTVRDICGIMYLYDYWAQGTLVTVSS

SEQ ID NO: 127 - protein, 127 aa, synthetic construct
EVQLVESGGGVVQPGGSLRLSCAASGFTLDYYVIGWFRQAPGKEREGVACLSSNGDRTNYADSVKGRFTISRDIAKNTVSLQMNSLRPEDTALYHCAAGTSTTVRDECGIMYLYDYWAQGTLVTVSS

SEQ ID NO: 128 - protein, 127 aa, synthetic construct
EVQLVESGGGVVQPGGSLRLSCAASGFTLDYYVIGWFRQAPGKEREGVACLSSNGDRTNYADSVKGRFTISRDIAKNTVSLQMNSLRPEDTALYHCAAGTSTTVRDVCGIMYLYDYWAQGTLVTVSS

SEQ ID NO: 129 - protein, 127 aa, synthetic construct
EVQLVESGGGVVQPGGSLRLSCAASGFTLDYYVIGWFRQAPGKEREGVACLSSRGDRINYADSVKGRFTISRDIAKNTVYLQMNSLRPEDTALYHCAAGTSTTVRDRCGIMYLYDYWAQGTLVTVSS

SEQ ID NO: 130 - protein, 127 aa, synthetic construct
EVQLVESGGGVVQPGGSLRLSCAASGFTLDYYVIGWFRQAPGKEREGVACLSSRGDRINYADSVKGRFTISRDIAKNTVYLQMNSLRPEDTALYHCAAGTSTTVRDTCGIMYLYDYWAQGTLVTVSS

SEQ ID NO: 131 - protein, 127 aa, synthetic construct
EVQLVESGGGVVQPGGSLRLSCAASGFTLDYYVIGWFRQAPGKEREGVACLSSRGDRINYADSVKGRFTISRDIAKNTVYLQMNSLRPEDTALYHCAAGTSTTVRDICGIMYLYDYWAQGTLVTVSS

SEQ ID NO: 132 - protein, 127 aa, synthetic construct
EVQLVESGGGVVQPGGSLRLSCAASGFTLDYYVIGWFRQAPGKEREGVACLSSRGDRINYADSVKGRFTISRDIAKNTVYLQMNSLRPEDTALYHCAAGTSTTVRDECGIMYLYDYWAQGTLVTVSS

SEQ ID NO: 133 - protein, 127 aa, synthetic construct
EVQLVESGGGVVQPGGSLRLSCAASGFTLDYYVIGWFRQAPGKEREGVACLSSRGDRINYADSVKGRFTISRDIAKNTVYLQMNSLRPEDTALYHCAAGTSTTVRDVCGIMYLYDYWAQGTLVTVSS

SEQ ID NO: 134 - protein, 127 aa, synthetic construct
EVQLVESGGGVVQPGGSLRLSCAASGFTLDYYVIGWFRQAPGKEREGVACLSSRGDRINYADSVKGRFTISRDIAKNTVSLQMNSLRPEDTALYHCAAGTSTTVRDRCGIMYLYDYWAQGTLVTVSS

SEQ ID NO: 135 - protein, 127 aa, synthetic construct
EVQLVESGGGVVQPGGSLRLSCAASGFTLDYYVIGWFRQAPGKEREGVACLSSRGDRINYADSVKGRFTISRDIAKNTVSLQMNSLRPEDTALYHCAAGTSTTVRDTCGIMYLYDYWAQGTLVTVSS

SEQ ID NO: 136 - protein, 127 aa, synthetic construct
EVQLVESGGGVVQPGGSLRLSCAATGFTLDYYVIGWFRQAPGKEREGVACLSSNGDRINYADSVKGRFTISRDIAKNTVYLQMNSLRPEDTALYHCAYGTSTTVRDMCGIMYLYDYWAQGTLVTVSS

SEQ ID NO: 137 - protein, 127 aa, synthetic construct
EVQLVESGGGVVQPGGSLRLSCAASGFTLDYYVIGWFRQAPGKEREGVACLSSNGDRTNYADSVKGRFTISRDIAKNTVYLQMNSLRPEDTALYHCAAGTSTTVRDICGIMYLYDYWAQGTLVTVSS

SEQ ID NO: 138 - protein, 127 aa, synthetic construct
EVQLVESGGGVVQPGGSLRLSCAASGFTLDYYVIGWFRQAPGKEREGVACLSSRGDRINYADSVKGRFTISRDIAKNTVSLQMNSLRPEDTALYHCAAGTSTTVRDVCGIMYLYDYWAQGTLVTVSS

SEQ ID NO: 139 - protein, 127 aa, synthetic construct
EVQLVESGGGVVQPGGSLRLSCAASGFTLDYYVIGWFRQAPGKEREGVACLSSRGDRTNYADSVKGRFTISRDIAKNTVYLQMNSLRPEDTALYHCAAGTSTTVRDRCGIMYLYDYWAQGTLVTVSS

SEQ ID NO: 140 - protein, 127 aa, synthetic construct
EVQLVESGGGVVQPGGSLRLSCAASGFTLDYYVIGWFRQAPGKEREGVACLSSRGDRTNYADSVKGRFTISRDIAKNTVYLQMNSLRPEDTALYHCAAGTSTTVRDTCGIMYLYDYWAQGTLVTVSS

SEQ ID NO: 141 - protein, 127 aa, synthetic construct
EVQLVESGGGVVQPGGSLRLSCAASGFTLDYYVIGWFRQAPGKEREGVACLSSRGDRTNYADSVKGRFTISRDIAKNTVYLQMNSLRPEDTALYHCAAGTSTTVRDICGIMYLYDYWAQGTLVTVSS

SEQ ID NO: 142 - protein, 127 aa, synthetic construct
EVQLVESGGGVVQPGGSLRLSCAASGFTLDYYVIGWFRQAPGKEREGVACLSSRGDRTNYADSVKGRFTISRDIAKNTVYLQMNSLRPEDTALYHCAAGTSTTVRDECGIMYLYDYWAQGTLVTVSS

SEQ ID NO: 143 - protein, 127 aa, synthetic construct
EVQLVESGGGVVQPGGSLRLSCAASGFTLDYYVIGWFRQAPGKEREGVACLSSRGDRTNYADSVKGRFTISRDIAKNTVYLQMNSLRPEDTALYHCAAGTSTTVRDVCGIMYLYDYWAQGTLVTVSS

SEQ ID NO: 144 - protein, 127 aa, synthetic construct
EVQLVESGGGVVQPGGSLRLSCAASGFTLDYYVIGWFRQAPGKEREGVACLSSRGDRTNYADSVKGRFTISRDIAKNTVSLQMNSLRPEDTALYHCAAGTSTTVRDRCGIMYLYDYWAQGTLVTVSS

SEQ ID NO: 145 - protein, 127 aa, synthetic construct
EVQLVESGGGVVQPGGSLRLSCAASGFTLDYYVIGWFRQAPGKEREGVACLSSRGDRTNYADSVKGRFTISRDIAKNTVSLQMNSLRPEDTALYHCAAGTSTTVRDTCGIMYLYDYWAQGTLVTVSS

SEQ ID NO: 146 - protein, 127 aa, synthetic construct
EVQLVESGGGVVQPGGSLRLSCAASGFTLDYYVIGWFRQAPGKEREGVACLSSRGDRTNYADSVKGRFTISRDIAKNTVSLQMNSLRPEDTALYHCAAGTSTTVRDICGIMYLYDYWAQGTLVTVSS

SEQ ID NO: 147 - protein, 127 aa, synthetic construct
EVQLVESGGGVVQPGGSLRLSCAASGFTLDYYVIGWFRQAPGKEREGVACLSSRGDRTNYADSVKGRFTISRDIAKNTVSLQMNSLRPEDTALYHCAAGTSTTVRDVCGIMYLYDYWAQGTLVTVSS

SEQ ID NO: 148 - protein, 127 aa, synthetic construct
EVQLVESGGGVVQPGGSLRLSCAASGFTLDYYVIGWFRQAPGKEREGVACLSSSGDRINYADSVKGRFTISRDIAKNTVYLQMNSLRPEDTALYHCAAGTSTTVRDRCGIMYLYDYWAQGTLVTVSS

SEQ ID NO: 149 - protein, 127 aa, synthetic construct
EVQLVESGGGVVQPGGSLRLSCAASGFTLDYYVIGWFRQAPGKEREGVACLSSSGDRINYADSVKGRFTISRDIAKNTVYLQMNSLRPEDTALYHCAAGTSTTVRDTCGIMYLYDYWAQGTLVTVSS

SEQ ID NO: 150 - protein, 127 aa, synthetic construct
EVQLVESGGGVVQPGGSLRLSCAASGFTLDYYVIGWFRQAPGKEREGVACLSSNGDRTNYADSVKGRFTISRDIAKNTVYLQMNSLRPEDTALYHCAAGTSTTVRDECGIMYLYDYWAQGTLVTVSS

SEQ ID NO: 151 - protein, 127 aa, synthetic construct
EVQLVESGGGVVQPGGSLRLSCAATGFTLDYYVIGWFRQAPGKEREGVACLSSNGDRINYADSVKGRFTISRDIAKNTVYLQMNSLRPEDTALYHCAQGTSTTVRDMCGIMYLYDYWAQGTLVTVSS

SEQ ID NO: 152 - protein, 127 aa, synthetic construct
EVQLVESGGGVVQPGGSLRLSCAASGFTLDYYVIGWFRQAPGKEREGVACLSSNGDRTNYADSVKGRFTISRDIAKNTVYLQMNSLRPEDTALYHCAAGTSTTVRDTCGIMYLYDYWAQGTLVTVSS

SEQ ID NO: 153 - protein, 127 aa, synthetic construct
EVQLVESGGGVVQPGGSLRLSCAASGFTLDYYVLGWFRQAPGKEREGVACLSSAGDRTNYADSVKGRFTISRDIAKNTIYLQINSLRPEDTALYHCAAGTSTTVRDICGIIYLYDYWAQGTLVTVSS

SEQ ID NO: 154 - protein, 127 aa, synthetic construct
EVQLVESGGGVVQPGGSLRLSCAASGFTLDYYVLGWFRQAPGKEREGVACLSSRGDRTNYADSVKGRFTISRDIAKNTLYLQINSLRPEDTALYHCAAGTSTTVRDICGIIYLYDYWAQGTLVTVSS

SEQ ID NO: 155 - protein, 127 aa, synthetic construct
EVQLVESGGGVVQPGGSLRLSCAASGFTLDYYVIGWFRQAPGKEREGVACLSSLGDRTNYADSVKGRFTISRDIAKNTVYLQINSLRPEDTALYHCAAATSTTVRDLCGIIYLYDYWAQGTLVTVSS

SEQ ID NO: 156 - protein, 127 aa, synthetic construct
EVQLVESGGGVVQPGGSLRLSCAASGFTLDYYVLGWFRQAPGKEREGVACLSSHGDRTNYADSVKGRFTISRDIAKNTIYLQINSLRPEDTALYHCAAGTSTTVRDICGIIYLYDYWAQGTLVTVSS

SEQ ID NO: 157 - protein, 127 aa, synthetic construct
EVQLVESGGGVVQPGGSLRLSCAASGFTLDYYVLGWFRQAPGKEREGVACLSSRGDRTNYADSVKGRFTISRDIAKNTIYLQINSLRPEDTALYHCAAGTSTTVRDICGIIYLYDYWAQGTLVTVSS

SEQ ID NO: 158 - protein, 127 aa, synthetic construct
EVQLVESGGGVVQPGGSLRLSCAASGFTLDYYVIGWFRQAPGKEREGVACLSSVGDRTNYADSVKGRFTISRDIAKNTVYLQINSLRPEDTALYHCAAATSTTVRDLCGIIYLYDYWAQGTLVTVSS

SEQ ID NO: 159 - protein, 127 aa, synthetic construct
EVQLVESGGGVVQPGGSLRLSCAASGFTLDYYVIGWFRQAPGKEREGVACLSSRGDRTNYADSVKGRFTISRDIAKNTVYLQINSLRPEDTALYHCAAATSTTVRDICGIIYVYDYWAQGTLVTVSS

SEQ ID NO: 160 - protein, 127 aa, synthetic construct
EVQLVESGGGVVQPGGSLRLSCAASGFTLDYYVIGWFRQAPGKEREGVACLSSKGDRTNYADSVKGRFTISRDIAKNTVYLQINSLRPEDTALYHCAAATSTTVRDLCGIIYLYDYWAQGTLVTVSS

SEQ ID NO: 161 - protein, 127 aa, synthetic construct
EVQLVESGGGVVQPGGSLRLSCAASGFTLDYYVLGWFRQAPGKEREGVACLSSFGDRTNYADSVKGRFTISRDIAKNTIYLQINSLRPEDTALYHCAAGTSTTVRDICGIIYLYDYWAQGTLVTVSS

SEQ ID NO: 162 - protein, 127 aa, synthetic construct
EVQLVESGGGVVQPGGSLRLSCAASGFTLDYYVLGWFRQAPGKEREGVACLSSSGDRTNYADSVKGRFTISRDIAKNTIYLQINSLRPEDTALYHCAAGTSTTVRDICGIIYLYDYWAQGTLVTVSS

SEQ ID NO: 163 - protein, 127 aa, synthetic construct
EVQLVESGGGVVQPGGSLRLSCAASGFTLDYYVLGWFRQAPGKEREGVACLSSIGDRTNYADSVKGRFTISRDIAKNTIYLQINSLRPEDTALYHCAAGTSTTVRDICGIIYLYDYWAQGTLVTVSS

SEQ ID NO: 164 - protein, 127 aa, synthetic construct
EVQLVESGGGVVQPGGSLRLSCAASGFTLDYYVLGWFRQAPGKEREGVACLSSLGDRTNYADSVKGRFTISRDIAKNTIYLQINSLRPEDTALYHCAAGTSTTVRDICGIIYLYDYWAQGTLVTVSS

SEQ ID NO: 165 - protein, 127 aa, synthetic construct
EVQLVESGGGVVQPGGSLRLSCAASGFTLDYYVIGWFRQAPGKEREGVACLSSFGDRTNYADSVKGRFTISRDIAKNTVYLQINSLRPEDTALYHCAAATSTTVRDLCGIIYLYDYWAQGTLVTVSS

SEQ ID NO: 166 - protein, 127 aa, synthetic construct
EVQLVESGGGVVQPGGSLRLSCAASGFTLDYYVIGWFRQAPGKEREGVACLSSHGDRTNYADSVKGRFTISRDIAKNTVYLQINSLRPEDTALYHCATATSTTVRDLCGIIYLYDYWAQGTLVTVSS

SEQ ID NO: 167 - protein, 127 aa, synthetic construct
EVQLVESGGGVVQPGGSLRLSCAASGFTLDYYVLGWFRQAPGKEREGVACLSSQGDRTNYADSVKGRFTISRDIAKNTIYLQINSLRPEDTALYHCAAGTSTTVRDICGIIYLYDYWAQGTLVTVSS

SEQ ID NO: 168 - protein, 127 aa, synthetic construct
EVQLVESGGGVVQPGGSLRLSCAASGFTLDYYVIGWFRQAPGKEREGVACLSSNGDRTNYADSVKGRFTISRDIAKNTVSLQMNSLRPEDTALYHCAAGTSTTVRDRCGIMYLYDYWAQGTLVTVSS

SEQ ID NO: 169 - protein, 127 aa, synthetic construct
EVQLVESGGGVVQPGGSLRLSCAASGFTLDYYVIGWFRQAPGKEREGVACLSSNGDRINYADSVKGRFTISRDIAKNTVYLQMNSLRPEDTALYHCAAGTSTTVRDRCGIMYLYDYWAQGTLVTVSS

SEQ ID NO: 170 - protein, 127 aa, synthetic construct
EVQLVESGGGVVQPGGSLRLSCAASGFTLDYYVIGWFRQAPGKEREGVACLSSNGDRINYADSVKGRFTISRDIAKNTVYLQMNSLRPEDTALYHCAAGTSTTVRDTCGIMYLYDYWAQGTLVTVSS

SEQ ID NO: 171 - protein, 127 aa, synthetic construct
EVQLVESGGGVVQPGGSLRLSCAASGFTLDYYVIGWFRQAPGKEREGVACLSSNGDRINYADSVKGRFTISRDIAKNTVYLQMNSLRPEDTALYHCAAGTSTTVRDICGIMYLYDYWAQGTLVTVSS

SEQ ID NO: 172 - protein, 127 aa, synthetic construct
EVQLVESGGGVVQPGGSLRLSCAASGFTLDYYVIGWFRQAPGKEREGVACLSSNGDRINYADSVKGRFTISRDIAKNTVYLQMNSLRPEDTALYHCAAGTSTTVRDECGIMYLYDYWAQGTLVTVSS

SEQ ID NO: 173 - protein, 127 aa, synthetic construct
EVQLVESGGGVVQPGGSLRLSCAASGFTLDYYVIGWFRQAPGKEREGVACLSSNGDRINYADSVKGRFTISRDIAKNTVYLQMNSLRPEDTALYHCAAGTSTTVRDVCGIMYLYDYWAQGTLVTVSS

SEQ ID NO: 174 - protein, 127 aa, synthetic construct
EVQLVESGGGVVQPGGSLRLSCAASGFTLDYYVIGWFRQAPGKEREGVACLSSNGDRINYADSVKGRFTISRDIAKNTVSLQMNSLRPEDTALYHCAAGTSTTVRDRCGIMYLYDYWAQGTLVTVSS

SEQ ID NO: 175 - protein, 127 aa, synthetic construct
EVQLVESGGGVVQPGGSLRLSCAASGFTLDYYVIGWFRQAPGKEREGVACLSSNGDRINYADSVKGRFTISRDIAKNTVSLQMNSLRPEDTALYHCAAGTSTTVRDTCGIMYLYDYWAQGTLVTVSS

SEQ ID NO: 176 - protein, 127 aa, synthetic construct
EVQLVESGGGVVQPGGSLRLSCAASGFTLDYYVIGWFRQAPGKEREGVACLSSNGDRINYADSVKGRFTISRDIAKNTVSLQMNSLRPEDTALYHCAAGTSTTVRDICGIMYLYDYWAQGTLVTVSS

SEQ ID NO: 177 - protein, 127 aa, synthetic construct
EVQLVESGGGVVQPGGSLRLSCAASGFTLDYYVIGWFRQAPGKEREGVACLSSNGDRINYADSVKGRFTISRDIAKNTVSLQMNSLRPEDTALYHCAAGTSTTVRDECGIMYLYDYWAQGTLVTVSS

SEQ ID NO: 178 - protein, 127 aa, synthetic construct
EVQLVESGGGVVQPGGSLRLSCAASGFTLDYYVIGWFRQAPGKEREGVACLSSNGDRINYADSVKGRFTISRDIAKNTVSLQMNSLRPEDTALYHCAAGTSTTVRDVCGIMYLYDYWAQGTLVTVSS

SEQ ID NO: 179 - protein, 127 aa, synthetic construct
EVQLVESGGGVVQPGGSLRLSCAASGFTLDYYVIGWFRQAPGKEREGVACLSSSGDRINYADSVKGRFTISRDIAKNTVYLQMNSLRPEDTALYHCAAGTSTTVRDICGIMYLYDYWAQGTLVTVSS

SEQ ID NO: 180 - protein, 127 aa, synthetic construct
EVQLVESGGGVVQPGGSLRLSCAASGFTLDYYVIGWFRQAPGKEREGVACLSSRGDRINYADSVKGRFTISRDIAKNTVSLQMNSLRPEDTALYHCAAGTSTTVRDECGIMYLYDYWAQGTLVTVSS

SEQ ID NO: 181 - protein, 127 aa, synthetic construct
EVQLVESGGGVVQPGGSLRLSCAASGFTLDYYVIGWFRQAPGKEREGVACLSSRGDRINYADSVKGRFTISRDIAKNTVSLQMNSLRPEDTALYHCAAGTSTTVRDICGIMYLYDYWAQGTLVTVSS

SEQ ID NO: 182 - protein, 127 aa, synthetic construct
EVQLVESGGGVVQPGGSLRLSCAASGFTLDYYVIGWFRQAPGKEREGVACSSSEGDRINYADSVKGRFTISRDIAKNTVSLQMNSLRPEDTALYHCAAGTSTTVRDLCFIMYLYDYWAQGTLVTVSS

SEQ ID NO: 183 - protein, 127 aa, synthetic construct
EVQLVESGGGVVQPGGSLRLSCAASGFTLDYYVFGWFRQAPGKEREGVACLSSEGDRINYADSVKGRFTISRDIAKNTVDLQMNSLRPEDTALYHCAAGTSTTVRDLCFIMYLYDYWAQGTLVTVSS

SEQ ID NO: 184 - protein, 127 aa, synthetic construct
EVQLVESGGGVVQPGGSLRLSCAASGFTLDYYVIGWFRQAPGKEREGVACLSSSGDRINYADSVKGRFTISRDIAKNTVSLQMNSLRPEDTALYHCAAGTSTTVRDRCGIMYLYDYWAQGTLVTVSS

SEQ ID NO: 185 - protein, 127 aa, synthetic construct
EVQLVESGGGVVQPGGSLRLSCAASGFTLDYYVIGWFRQAPGKEREGVACLSSEGDRANYADSVKGRFTISRDIAKNTVDLQMNSLRPEDTALYHCAAGTSTTVRDLCGIMYLYDYWAQGTLVTVSS

SEQ ID NO: 186 - protein, 127 aa, synthetic construct
EVQLVESGGGVVQPGGSLRLSCAASGFTLDYYVYGWFRQAPGKEREGVACLSSEGDRGNYADSVKGRFTISRDIAKNTVDLQMNSLRPEDTALYHCAAGTSTTVRDLCGIMYLYDYWAQGTLVTVSS

SEQ ID NO: 187 - protein, 127 aa, synthetic construct
EVQLVESGGGVVQPGGSLRLSCAASGFTLDYYVFGWFRQAPGKEREGVACLSGEGDRINYADSVKGRFTISRDIAKNTVDLQMNSLRPEDTALYHCAAGTSTTVRDLCGIMYLYDYWAQGTLVTVSS

SEQ ID NO: 188 - protein, 127 aa, synthetic construct
EVQLVESGGGVVQPGGSLRLSCAASGFTLDYYVIGWFRQAPGKEREGVACHSSEGDRINYADSVKGRFTISRDIAKNTVSLQMNSLRPEDTALYHCAAGTSTTVRDLCGIMYLYDYWAQGTLVTVSS

SEQ ID NO: 189 - protein, 127 aa, synthetic construct
EVQLVESGGGVVQPGGSLRLSCAASGFTLDYYVIGWFRQAPGKEREGVACLSEEGDRINYADSVKGRFTISRDIAKNTVSLQMNSLRPEDTALYHCAAGTSTTVRDLCGIMYLYDYWAQGTLVTVSS

SEQ ID NO: 190 - protein, 127 aa, synthetic construct
EVQLVESGGGVVQPGGSLRLSCAASGFTLDYYVIGWFRQAPGKEREGVACLSSEGDRINYADSVKGRFTISRDIAKNTVDLQMNSLRPEDTALYHCAAGTSTTVRDLCGIMYLYDLWAQGTLVTVSS

SEQ ID NO: 191 - protein, 127 aa, synthetic construct
EVQLVESGGGVVQPGGSLRLSCAASGFTLDYYVLGWFRQAPGKEREGVACTSSEGDRINYADSVKGRFTISRDIAKNTVSLQMNSLRPEDTALYHCAAGTSTTVRDLCFIMYLYDYWAQGTLVTVSS

SEQ ID NO: 192 - protein, 127 aa, synthetic construct
EVQLVESGGGVVQPGGSLRLSCAASGFTLDYYVYGWFRQAPGKEREGVACTSSEGDRINYADSVKGRFTISRDIAKNTVSLQMNSLRPEDTALYHCAAGTSTTVRDLCFIMYLYDYWAQGTLVTVSS

SEQ ID NO: 193 - protein, 127 aa, synthetic construct
EVQLVESGGGVVQPGGSLRLSCAASGFTLDYYVFGWFRQAPGKEREGVACTSSEGDRINYADSVKGRFTISRDIAKNTVSLQMNSLRPEDTALYHCAAGTSTTVRDLCFIMYLYDYWAQGTLVTVSS

SEQ ID NO: 194 - protein, 127 aa, synthetic construct
EVQLVESGGGVVQPGGSLRLSCAASGFTLDYYVIGWFRQAPGKEREGVACTSSEGDRINYADSVKGRFTISRDIAKNTVSLQMNSLRPEDTALYHCAAGTSTTVRDLCFIMYLYDYWAQGTLVTVSS

SEQ ID NO: 195 - protein, 127 aa, synthetic construct
EVQLVESGGGVVQPGGSLRLSCAASGFTLDYYVLGWFRQAPGKEREGVACSSSEGDRINYADSVKGRFTISRDIAKNTVSLQMNSLRPEDTALYHCAAGTSTTVRDLCFIMYLYDYWAQGTLVTVSS

SEQ ID NO: 196 - protein, 127 aa, synthetic construct
EVQLVESGGGVVQPGGSLRLSCAASGFTLDYYVYGWFRQAPGKEREGVACSSSEGDRINYADSVKGRFTISRDIAKNTVSLQMNSLRPEDTALYHCAAGTSTTVRDLCFIMYLYDYWAQGTLVTVSS

SEQ ID NO: 197 - protein, 127 aa, synthetic construct
EVQLVESGGGVVQPGGSLRLSCAASGFTLDYYVIGWFRQAPGKEREGVACLSSSGDRINYADSVKGRFTISRDIAKNTVSLQMNSLRPEDTALYHCAAGTSTTVRDTCGIMYLYDYWAQGTLVTVSS

SEQ ID NO: 198 - protein, 127 aa, synthetic construct
EVQLVESGGGVVQPGGSLRLSCAASGFTLDYYVIGWFRQAPGKEREGVACTSSEGDRINYADSVKGRFTISRDIAKNTVDLQMNSLRPEDTALYHCAAGTSTTVRDLCGIMYLYDYWAQGTLVTVSS

SEQ ID NO: 199 - protein, 127 aa, synthetic construct
EVQLVESGGGVVQPGGSLRLSCAASGFTLDYYVYGWFRQAPGKEREGVACLSSEGDRINYADSVKGRFTISRDIAKNTVSLQMNSLRPEDTALYHCAAGTSTTVRDLCGIMYLYDYWAQGTLVTVSS

SEQ ID NO: 200 - protein, 127 aa, synthetic construct
EVQLVESGGGVVQPGGSLRLSCAASGFTLDYYVYGWFRQAPGKEREGVACLSSEGDRINYADSVKGRFTISRDIAKNTVSLQMNSLRPEDTALYHCAAGTSTTVRDLCFIMYLYDYWAQGTLVTVSS

SEQ ID NO: 201 - protein, 127 aa, synthetic construct
EVQLVESGGGVVQPGGSLRLSCAASGFTLDYYVFGWFRQAPGKEREGVACLSSEGDRINYADSVKGRFTISRDIAKNTVSLQMNSLRPEDTALYHCAAGTSTTVRDLCFIMYLYDYWAQGTLVTVSS

SEQ ID NO: 202 - protein, 127 aa, synthetic construct
EVQLVESGGGVVQPGGSLRLSCAASGFTLDYYVIGWFRQAPGKEREGVACLSSEGDRINYADSVKGRFTISRDIAKNTVSLQMNSLRPEDTALYHCAAGTSTTVRDLCFIMYLYDYWAQGTLVTVSS

SEQ ID NO: 203 - protein, 127 aa, synthetic construct
EVQLVESGGGVVQPGGSLRLSCAASGFTLDYYVLGWFRQAPGKEREGVACTSSEGDRINYADSVKGRFTISRDIAKNTVDLQMNSLRPEDTALYHCAAGTSTTVRDLCFIMYLYDYWAQGTLVTVSS

SEQ ID NO: 204 - protein, 127 aa, synthetic construct
EVQLVESGGGVVQPGGSLRLSCAASGFTLDYYVYGWFRQAPGKEREGVACTSSEGDRINYADSVKGRFTISRDIAKNTVDLQMNSLRPEDTALYHCAAGTSTTVRDLCFIMYLYDYWAQGTLVTVSS

SEQ ID NO: 205 - protein, 127 aa, synthetic construct
EVQLVESGGGVVQPGGSLRLSCAASGFTLDYYVIGWFRQAPGKEREGVACTSSEGDRINYADSVKGRFTISRDIAKNTVDLQMNSLRPEDTALYHCAAGTSTTVRDLCFIMYLYDYWAQGTLVTVSS

SEQ ID NO: 206 - protein, 127 aa, synthetic construct
EVQLVESGGGVVQPGGSLRLSCAASGFTLDYYVYGWFRQAPGKEREGVACSSSEGDRINYADSVKGRFTISRDIAKNTVDLQMNSLRPEDTALYHCAAGTSTTVRDLCFIMYLYDYWAQGTLVTVSS

SEQ ID NO: 207 - protein, 127 aa, synthetic construct
EVQLVESGGGVVQPGGSLRLSCAASGFTLDYYVFGWFRQAPGKEREGVACSSSEGDRINYADSVKGRFTISRDIAKNTVDLQMNSLRPEDTALYHCAAGTSTTVRDLCFIMYLYDYWAQGTLVTVSS

SEQ ID NO: 208 - protein, 127 aa, synthetic construct
EVQLVESGGGVVQPGGSLRLSCAASGFTLDYYVIGWFRQAPGKEREGVACSSSEGDRINYADSVKGRFTISRDIAKNTVDLQMNSLRPEDTALYHCAAGTSTTVRDLCFIMYLYDYWAQGTLVTVSS

SEQ ID NO: 209 - protein, 127 aa, synthetic construct
EVQLVESGGGVVQPGGSLRLSCAASGFTLDYYVLGWFRQAPGKEREGVACLSSEGDRINYADSVKGRFTISRDIAKNTVDLQMNSLRPEDTALYHCAAGTSTTVRDLCFIMYLYDYWAQGTLVTVSS

SEQ ID NO: 210 - protein, 127 aa, synthetic construct
EVQLVESGGGVVQPGGSLRLSCAASGFTLDYYVYGWFRQAPGKEREGVACLSSEGDRINYADSVKGRFTISRDIAKNTVDLQMNSLRPEDTALYHCAAGTSTTVRDLCFIMYLYDYWAQGTLVTVSS

SEQ ID NO: 211 - protein, 127 aa, synthetic construct
EVQLVESGGGVVQPGGSLRLSCAASGFTLDYYVIGWFRQAPGKEREGVACLSSEGDRANYADSVKGRFTISRDIAKNTVSLQMNSLRPEDTALYHCAAGTSTTVRDLCGIMYLYDYWAQGTLVTVSS

SEQ ID NO: 212 - protein, 127 aa, synthetic construct
EVQLVESGGGVVQPGGSLRLSCAASGFTLDYYVIGWFRQAPGKEREGVACLSSSGDRINYADSVKGRFTISRDIAKNTVYLQMNSLRPEDTALYHCAAGTSTTVRDVCGIMYLYDYWAQGTLVTVSS

SEQ ID NO: 213 - protein, 127 aa, synthetic construct
EVQLVESGGGVVQPGGSLRLSCAASGFTLDYYVYGWFRQAPGKEREGVACLSSEGDRTNYADSVKGRFTISRDIAKNTVSLQMNSLRPEDTALYHCAAGTSTTVRDLCGIMYLYDYWAQGTLVTVSS

SEQ ID NO: 214 - protein, 127 aa, synthetic construct
EVQLVESGGGVVQPGGSLRLSCAASGFTLDYYVIGWFRQAPGKEREGVACLSSSGDRINYADSVKGRFTISRDIAKNTVYLQMNSLRPEDTALYHCAAGTSTTVRDECGIMYLYDYWAQGTLVTVSS

SEQ ID NO: 215 - protein, 127 aa, synthetic construct
EVQLVESGGGVVQPGGSLRLSCAASGFTLDYYVFGWFRQAPGKEREGVACSSSEGDRINYADSVKGRFTISRDIAKNTVSLQMNSLRPEDTALYHCAAGTSTTVRDLCFIMYLYDYWAQGTLVTVSS

SEQ ID NO: 216 - protein, 127 aa, synthetic construct
EVQLVESGGGVVQPGGSLRLSCAASGFTLDYYVIGWFRQAPGKEREGVACLSSSGDRINYADSVKGRFTISRDIAKNTVSLQMNSLRPEDTALYHCAAGTSTTVRDICGIMYLYDYWAQGTLVTVSS

SEQ ID NO: 217 - protein, 127 aa, synthetic construct
EVQLVESGGGVVQPGGSLRLSCAASGFTLDYYVIGWFRQAPGKEREGVACLSSSGDRINYADSVKGRFTISRDIAKNTVSLQMNSLRPEDTALYHCAAGTSTTVRDECGIMYLYDYWAQGTLVTVSS

SEQ ID NO: 218 - protein, 127 aa, synthetic construct
EVQLVESGGGVVQPGGSLRLSCAASGFTLDYYVIGWFRQAPGKEREGVACLSSSGDRINYADSVKGRFTISRDIAKNTVSLQMNSLRPEDTALYHCAAGTSTTVRDVCGIMYLYDYWAQGTLVTVSS

SEQ ID NO: 219 - protein, 127 aa, synthetic construct
EVQLVESGGGVVQPGGSLRLSCAASGFTLDYYVIGWFRQAPGKEREGVACLSSSGDRTNYADSVKGRFTISRDIAKNTVYLQMNSLRPEDTALYHCAAGTSTTVRDRCGIMYLYDYWAQGTLVTVSS

SEQ ID NO: 220 - protein, 127 aa, synthetic construct
EVQLVESGGGVVQPGGSLRLSCAASGFTLDYYVIGWFRQAPGKEREGVACLSSSGDRTNYADSVKGRFTISRDIAKNTVYLQMNSLRPEDTALYHCAAGTSTTVRDTCGIMYLYDYWAQGTLVTVSS

SEQ ID NO: 221 - protein, 127 aa, synthetic construct
EVQLVESGGGVVQPGGSLRLSCAASGFTLDYYVIGWFRQAPGKEREGVACLSSSGDRTNYADSVKGRFTISRDIAKNTVYLQMNSLRPEDTALYHCAAGTSTTVRDICGIMYLYDYWAQGTLVTVSS

SEQ ID NO: 222 - protein, 127 aa, synthetic construct
EVQLVESGGGVVQPGGSLRLSCAASGFTLDYYVIGWFRQAPGKEREGVACLSSSGDRTNYADSVKGRFTISRDIAKNTVYLQMNSLRPEDTALYHCAAGTSTTVRDECGIMYLYDYWAQGTLVTVSS

SEQ ID NO: 223 - protein, 127 aa, synthetic construct
EVQLVESGGGVVQPGGSLRLSCAASGFTLDYYVIGWFRQAPGKEREGVACLSSSGDRTNYADSVKGRFTISRDIAKNTVYLQMNSLRPEDTALYHCAAGTSTTVRDVCGIMYLYDYWAQGTLVTVSS

SEQ ID NO: 224 - protein, 127 aa, synthetic construct
EVQLVESGGGVVQPGGSLRLSCAASGFTLDYYVIGWFRQAPGKEREGVACLSSSGDRTNYADSVKGRFTISRDIAKNTVSLQMNSLRPEDTALYHCAAGTSTTVRDRCGIMYLYDYWAQGTLVTVSS

SEQ ID NO: 225 - protein, 127 aa, synthetic construct
EVQLVESGGGVVQPGGSLRLSCAASGFTLDYYVIGWFRQAPGKEREGVACLSSSGDRTNYADSVKGRFTISRDIAKNTVSLQMNSLRPEDTALYHCAAGTSTTVRDTCGIMYLYDYWAQGTLVTVSS

SEQ ID NO: 226 - protein, 127 aa, synthetic construct
EVQLVESGGGVVQPGGSLRLSCAASGFTLDYYVIGWFRQAPGKEREGVACLSSSGDRTNYADSVKGRFTISRDIAKNTVSLQMNSLRPEDTALYHCAAGTSTTVRDICGIMYLYDYWAQGTLVTVSS

SEQ ID NO: 227 - protein, 127 aa, synthetic construct
EVQLVESGGGVVQPGGSLRLSCAASGFTLDYYVIGWFRQAPGKEREGVACLSSSGDRTNYADSVKGRFTISRDIAKNTVSLQMNSLRPEDTALYHCAAGTSTTVRDECGIMYLYDYWAQGTLVTVSS

SEQ ID NO: 228 - protein, 127 aa, synthetic construct
EVQLVESGGGVVQPGGSLRLSCAASGFTLDYYVIGWFRQAPGKEREGVACLSSSGDRTNYADSVKGRFTISRDIAKNTVSLQMNSLRPEDTALYHCAAGTSTTVRDVCGIMYLYDYWAQGTLVTVSS

SEQ ID NO: 229 - protein, 127 aa, synthetic construct
EVQLVESGGGVVQPGGSLRLSCAASGFTLDYYVLGWFRQAPGKEREGVACLSSNGDRINYADSVKGRFTISRDIAKNTLYLQMNSLRPEDTALYHCAAGTSTTVRDMCGIMYLYDYWAQGTLVTVSS

SEQ ID NO: 230 - protein, 127 aa, synthetic construct
EVQLVESGGGVVQPGGSLRLSCAASGFTLDYYVLGWFRQAPGKEREGVACLSSEGDRINYADSVKGRFTISRDIAKNTVYLQMNSLRPEDTALYHCAAGTSTTVRDLCGIMYLYDYWAQGTLVTVSS

SEQ ID NO: 231 - protein, 127 aa, synthetic construct
EVQLVESGGGVVQPGGSLRLSCAASGFTLDYYVLGWFRQAPGKEREGVACLSSEGDRTNYADSVKGRFTISRDIAKNTVYLQMNSLRPEDTALYHCAAGTSTTVRDLCGIMYLYDYWAQGTLVTVSS

SEQ ID NO: 232 - protein, 127 aa, synthetic construct
EVQLVESGGGVVQPGGSLRLSCAASGFTLDYYVLGWFRQAPGKEREGVACLSSEGDRRNYADSVKGRFTISRDIAKNTVYLQMNSLRPEDTALYHCAAGTSTTVRDLCGIMYLYDYWAQGTLVTVSS

SEQ ID NO: 233 - protein, 127 aa, synthetic construct
EVQLVESGGGVVQPGGSLRLSCAASGFTLDYYVLGWFRQAPGKEREGVACLSSEGDRHNYADSVKGRFTISRDIAKNTVYLQMNSLRPEDTALYHCAAGTSTTVRDLCGIMYLYDYWAQGTLVTVSS

SEQ ID NO: 234 - protein, 127 aa, synthetic construct
EVQLVESGGGVVQPGGSLRLSCAASGFTLDYYVLGWFRQAPGKEREGVACLSSEGDRGNYADSVKGRFTISRDIAKNTVYLQMNSLRPEDTALYHCAAGTSTTVRDLCGIMYLYDYWAQGTLVTVSS

SEQ ID NO: 235 - protein, 127 aa, synthetic construct
EVQLVESGGGVVQPGGSLRLSCAASGFTLDYYVIGWFRQAPGKEREGVACLSSEGDRRNYADSVKGRFTISRDIAKNTVYLQMNSLRPEDTALYHCAAGTSTTVRDLCGIMYLYDYWAQGTLVTVSS

SEQ ID NO: 236 - protein, 127 aa, synthetic construct
EVQLVESGGGVVQPGGSLRLSCAASGFTLDYYVIGWFRQAPGKEREGVACLSSEGDRHNYADSVKGRFTISRDIAKNTVYLQMNSLRPEDTALYHCAAGTSTTVRDLCGIMYLYDYWAQGTLVTVSS

SEQ ID NO: 237 - protein, 127 aa, synthetic construct
EVQLVESGGGVVQPGGSLRLSCAASGFTLDYYVIGWFRQAPGKEREGVACLSSEGDRGNYADSVKGRFTISRDIAKNTVYLQMNSLRPEDTALYHCAAGTSTTVRDLCGIMYLYDYWAQGTLVTVSS

SEQ ID NO: 238 - protein, 127 aa, synthetic construct
EVQLVESGGGVVQPGGSLRLSCAASGFTLDYYVIGWFRQAPGKEREGVACLSSEGDRTNYADSVKGRFTISRDIAKNTVYLQMNSLRPEDTALYHCAAGTSTTVRDLCGIMYLYDYWAQGTLVTVSS

SEQ ID NO: 239 - protein, 127 aa, synthetic construct
DVQLVESGGGVVQPGGSLRLSCAASGFTLDYYVLGWFRQAPGKEREGVACLSSEGDRTNYADSVKGRFTISRDIAKNTVSLQMNSLRPEDTALYHCAAGTSTTVRDLCGIMYLYDYWAQGTLVTVSS

SEQ ID NO: 240 - protein, 127 aa, synthetic construct
EVQLVESGGGVVQPGGSLRLSCAASGFTLDYYVFGWFRQAPGKEREGVACTSSEGDRINYADSVKGRFTISRDIAKNTVDLQMNSLRPEDTALYHCAAGTSTTVRDLCFIMYLYDYWAQGTLVTVSS

SEQ ID NO: 241 - protein, 127 aa, synthetic construct
EVQLVESGGGVVQPGGSLRLSCAASGFTLDYYVLGWFRQAPGKEREGVACSSSEGDRINYADSVKGRFTISRDIAKNTVDLQMNSLRPEDTALYHCAAGTSTTVRDLCFIMYLYDYWAQGTLVTVSS

SEQ ID NO: 242 - protein, 127 aa, synthetic construct
EVQLVESGGGVVQPGGSLRLSCAASGFTLDYYVIGWFRQAPGKEREGVACLSSEGDRINYADSVKGRFTISRDIAKNTVDLQMNSLRPEDTALYHCAAGTSTTVRDLCFIMYLYDYWAQGTLVTVSS

SEQ ID NO: 243 - protein, 127 aa, synthetic construct
EVQLVESGGGVVQPGGSLRLSCAASGFTLDYYVIGWFRQAPGKEREGVACLSSEGDRINYADSVKGRFTISRDIAKNTVSLQMNSLRPEDTALYHCAAGTSTTVRDLCGIMYLYDEWAQGTLVTVSS

SEQ ID NO: 244 - protein, 127 aa, synthetic construct
EVQLVESGGGVVQPGGSLRLSCAASGFTLDYYVIGWFRQAPGKEREGVACLSSEGDRINYADSVKGRFTISRDIAKNTVDLQMNSLRPEDTALYHCAAGTSTTVRDLCGIMYLYDEWAQGTLVTVSS

SEQ ID NO: 245 - protein, 127 aa, synthetic construct
EVQLVESGGGVVQPGGSLRLSCAASGFTLDYYVIGWFRQAPGKEREGVACLSSEGDRINYADSVKGRFTISRDIAKNTVSLQMNSLRPEDTALYHCAAGTSTTVRDLCGIMYLYDIWAQGTLVTVSS

SEQ ID NO: 246 - protein, 127 aa, synthetic construct
EVQLVESGGGVVQPGGSLRLSCAATGFTLDYYVIGWFRQAPGKEREGVACLSSNGDRITYADSVKGRFTISRDIAKNTVYLQMNSLRPEDTALYHCAAGTSTTVRDMCGIMYLYDYWAQGTLVTVSS

SEQ ID NO: 247 - protein, 127 aa, synthetic construct
EVQLVESGGGVVQPGGSLRLSCAATGFTLDYYVIGWFRQAPGKEREGVACLSSNGDRILYADSVKGRFTISRDIAKNTVYLQMNSLRPEDTALYHCAAGTSTTVRDMCGIMYLYDYWAQGTLVTVSS

SEQ ID NO: 248 - protein, 127 aa, synthetic construct
EVQLVESGGGVVQPGGSLRLSCAATGFTLDYYVIGWFRQAPGKEREGVACLSSNGDRIGYADSVKGRFTISRDIAKNTVYLQMNSLRPEDTALYHCAAGTSTTVRDMCGIMYLYDYWAQGTLVTVSS

SEQ ID NO: 249 - protein, 127 aa, synthetic construct
EVQLVESGGGVVQPGGSLRLSCAATGFTLDYYVIGWFRQAPGKEREGVACLSSNGDRIEYADSVKGRFTISRDIAKNTVYLQMNSLRPEDTALYHCAAGTSTTVRDMCGIMYLYDYWAQGTLVTVSS

SEQ ID NO: 250 - protein, 127 aa, synthetic construct
EVQLVESGGGVVQPGGSLRLSCAATGFTLDYYVIGWFRQAPGKEREGVACLSSNGDRIHYADSVKGRFTISRDIAKNTVYLQMNSLRPEDTALYHCAAGTSTTVRDMCGIMYLYDYWAQGTLVTVSS

SEQ ID NO: 251 - protein, 127 aa, synthetic construct
EVQLVESGGGVVQPGGSLRLSCAATGFTLDYYVIGWFRQAPGKEREGVACLSSNGDRIQYADSVKGRFTISRDIAKNTVYLQMNSLRPEDTALYHCAAGTSTTVRDMCGIMYLYDYWAQGTLVTVSS

SEQ ID NO: 252 - protein, 127 aa, synthetic construct
EVQLVESGGGVVQPGGSLRLSCAATGFTLDYYVIGWFRQAPGKEREGVACLSSNKDRINYADSVKGRFTISRDIAKNTVYLQMNSLRPEDTALYHCAAGTSTTVRDMCGIMYLYDYWAQGTLVTVSS

SEQ ID NO: 253 - protein, 127 aa, synthetic construct
EVQLVESGGGVVQPGGSLRLSCAATGFTLDYYVIGWFRQAPGKEREGVACLSSNVDRINYADSVKGRFTISRDIAKNTVYLQMNSLRPEDTALYHCAAGTSTTVRDMCGIMYLYDYWAQGTLVTVSS

SEQ ID NO: 254 - protein, 127 aa, synthetic construct
EVQLVESGGGVVQPGGSLRLSCAATGFTLDYYVIGWFRQAPGKEREGVACLSSNYDRINYADSVKGRFTISRDIAKNTVYLQMNSLRPEDTALYHCAAGTSTTVRDMCGIMYLYDYWAQGTLVTVSS

SEQ ID NO: 255 - protein, 127 aa, synthetic construct
EVQLVESGGGVVQPGGSLRLSCAATGFTLDYYVIGWFRQAPGKEREGVACLSSNQDRINYADSVKGRFTISRDIAKNTVYLQMNSLRPEDTALYHCAAGTSTTVRDMCGIMYLYDYWAQGTLVTVSS

SEQ ID NO: 256 - protein, 127 aa, synthetic construct
EVQLVESGGGVVQPGGSLRLSCAATGFTLDYYVIGWFRQAPGKEREGVACLSSNGDRIIYADSVKGRFTISRDIAKNTVYLQMNSLRPEDTALYHCAAGTSTTVRDMCGIMYLYDYWAQGTLVTVSS

SEQ ID NO: 257 - protein, 127 aa, synthetic construct
EVQLVESGGGVVQPGGSLRLSCAATGFTLDYYVIGWFRQAPGKEREGVACLSSNRDRINYADSVKGRFTISRDIAKNTVYLQMNSLRPEDTALYHCAAGTSTTVRDMCGIMYLYDYWAQGTLVTVSS

SEQ ID NO: 258 - protein, 127 aa, synthetic construct
EVQLVESGGGVVQPGGSLRLSCAATGFTLDYYVIGWFRQAPGKEREGVACLSSNDDRINYADSVKGRFTISRDIAKNTVYLQMNSLRPEDTALYHCAAGTSTTVRDMCGIMYLYDYWAQGTLVTVSS

SEQ ID NO: 259 - protein, 127 aa, synthetic construct
EVQLVESGGGVVQPGGSLRLSCAATGFTLDYYVIGWFRQAPGKEREGVACLSSNTDRINYADSVKGRFTISRDIAKNTVYLQMNSLRPEDTALYHCAAGTSTTVRDMCGIMYLYDYWAQGTLVTVSS

SEQ ID NO: 260 - protein, 127 aa, synthetic construct
EVQLVESGGGVVQPGGSLRLSCAATGFTLDYYVIGWFRQAPGKEREGVACLSSNADRINYADSVKGRFTISRDIAKNTVYLQMNSLRPEDTALYHCAAGTSTTVRDMCGIMYLYDYWAQGTLVTVSS

SEQ ID NO: 261 - protein, 127 aa, synthetic construct
EVQLVESGGGVVQPGGSLRLSCAATGFTLDYYVIGWFRQAPGKEREGVACLSSNSDRINYADSVKGRFTISRDIAKNTVYLQMNSLRPEDTALYHCAAGTSTTVRDMCGIMYLYDYWAQGTLVTVSS

SEQ ID NO: 262 - protein, 127 aa, synthetic construct
EVQLVESGGGVVQPGGSLRLSCAATGFTLDYYVIGWFRQAPGKEREGVACLSSNFDRINYADSVKGRFTISRDIAKNTVYLQMNSLRPEDTALYHCAAGTSTTVRDMCGIMYLYDYWAQGTLVTVSS

SEQ ID NO: 263 - protein, 127 aa, synthetic construct
EVQLVESGGGVVQPGGSLRLSCAATGFTLDYYVIGWFRQAPGKEREGVACLSSNPDRINYADSVKGRFTISRDIAKNTVYLQMNSLRPEDTALYHCAAGTSTTVRDMCGIMYLYDYWAQGTLVTVSS

SEQ ID NO: 264 - protein, 127 aa, synthetic construct
EVQLVESGGGVVQPGGSLRLSCAATGFTLDYYVIGWFRQAPGKEREGVACLSSNLDRINYADSVKGRFTISRDIAKNTVYLQMNSLRPEDTALYHCAAGTSTTVRDMCGIMYLYDYWAQGTLVTVSS

SEQ ID NO: 265 - protein, 127 aa, synthetic construct
EVQLVESGGGVVQPGGSLRLSCAATGFTLDYYVIGWFRQAPGKEREGVACLSSRGDRINYADSVKGRFTISRDIAKNTVYLQMNSLRPEDTALYHCAAGTSTTVRDMCGIMYLYDYWAQGTLVTVSS

SEQ ID NO: 266 - protein, 127 aa, synthetic construct
EVQLVESGGGVVQPGGSLRLSCAATGFTLDYYVIGWFRQAPGKEREGVACLSSHGDRINYADSVKGRFTISRDIAKNTVYLQMNSLRPEDTALYHCAAGTSTTVRDMCGIMYLYDYWAQGTLVTVSS

SEQ ID NO: 267 - protein, 127 aa, synthetic construct
EVQLVESGGGVVQPGGSLRLSCAATGFTLDYYVIGWFRQAPGKEREGVACLSSLGDRINYADSVKGRFTISRDIAKNTVYLQMNSLRPEDTALYHCAAGTSTTVRDMCGIMYLYDYWAQGTLVTVSS

SEQ ID NO: 268 - protein, 127 aa, synthetic construct
EVQLVESGGGVVQPGGSLRLSCAATGFTLDYYVIGWFRQAPGKEREGVACLSSQGDRINYADSVKGRFTISRDIAKNTVYLQMNSLRPEDTALYHCAAGTSTTVRDMCGIMYLYDYWAQGTLVTVSS

SEQ ID NO: 269 - protein, 127 aa, synthetic construct
EVQLVESGGGVVQPGGSLRLSCAATGFTLDYYVIGWFRQAPGKEREGVACLSSVGDRINYADSVKGRFTISRDIAKNTVYLQMNSLRPEDTALYHCAAGTSTTVRDMCGIMYLYDYWAQGTLVTVSS

SEQ ID NO: 270 - protein, 127 aa, synthetic construct
EVQLVESGGGVVQPGGSLRLSCAATGFTLDYYVIGWFRQAPGKEREGVACLSSNHDRINYADSVKGRFTISRDIAKNTVYLQMNSLRPEDTALYHCAAGTSTTVRDMCGIMYLYDYWAQGTLVTVSS

SEQ ID NO: 271 - protein, 127 aa, synthetic construct
EVQLVESGGGVVQPGGSLRLSCAATGFTLDYYVIGWFRQAPGKEREGVACLSSNGDRIYYADSVKGRFTISRDIAKNTVYLQMNSLRPEDTALYHCAAGTSTTVRDMCGIMYLYDYWAQGTLVTVSS

SEQ ID NO: 272 - protein, 127 aa, synthetic construct
EVQLVESGGGVVQPGGSLRLSCAATGFTLDYYVIGWFRQAPGKEREGVACLSSNGDRIPYADSVKGRFTISRDIAKNTVYLQMNSLRPEDTALYHCAAGTSTTVRDMCGIMYLYDYWAQGTLVTVSS

SEQ ID NO: 273 - protein, 127 aa, synthetic construct
EVQLVESGGGVVQPGGSLRLSCAATGFTLDYYVIGWFRQAPGKEREGVACLSSNGDRIHYADSVKGRFTISRDIAKNTVYLQMNSLRPEDTALYHCAAGTSTTVRDMCGIMYFYDYWAQGTLVTVSS

SEQ ID NO: 274 - protein, 127 aa, synthetic construct
EVQLVESGGGVVQPGGSLRLSCAATGFTLDYYVIGWFRQAPGKEREGVACLSSNGDRINYADSVKGRFTISRDIAKNTVYLQMNSLRPEDTALYHCAAGTSTTVRDSCGIMYLYDYWAQGTLVTVSS

SEQ ID NO: 275 - protein, 127 aa, synthetic construct
EVQLVESGGGVVQPGGSLRLSCAATGFTLDYYVIGWFRQAPGKEREGVACLSSNGDRINYADSVKGRFTISRDIAKNTVYLQMNSLRPEDTALYHCAAGTSTTVRDGCGIMYLYDYWAQGTLVTVSS

SEQ ID NO: 276 - protein, 127 aa, synthetic construct
EVQLVESGGGVVQPGGSLRLSCAATGFTLDYYVIGWFRQAPGKEREGVACLSSNGDRINYADSVKGRFTISRDIAKNTVYLQMNSLRPEDTALYHCAAGTSTTVRDTCGIMYLYDYWAQGTLVTVSS

SEQ ID NO: 277 - protein, 127 aa, synthetic construct
EVQLVESGGGVVQPGGSLRLSCAATGFTLDYYVIGWFRQAPGKEREGVACLSSNGDRINYADSVKGRFTISRDIAKNTVYLQMNSLRPEDTALYHCAAGTSTTVRDKCGIMYLYDYWAQGTLVTVSS

SEQ ID NO: 278 - protein, 127 aa, synthetic construct
EVQLVESGGGVVQPGGSLRLSCAATGFTLDYYVIGWFRQAPGKEREGVACLSSNGDRINYADSVKGRFTISRDIAKNTVYLQMNSLRPEDTALYHCAAGTSTTVRDDCGIMYLYDYWAQGTLVTVSS

SEQ ID NO: 279 - protein, 127 aa, synthetic construct
EVQLVESGGGVVQPGGSLRLSCAATGFTLDYYVIGWFRQAPGKEREGVACLSSNGDRINYADSVKGRFTISRDIAKNTVYLQMNSLRPEDTALYHCAAGTSTTVRDLCGIMYLYDYWAQGTLVTVSS

SEQ ID NO: 280 - protein, 127 aa, synthetic construct
EVQLVESGGGVVQPGGSLRLSCAATGFTLDYYVIGWFRQAPGKEREGVACLSSNGDRINYADSVKGRFTISRDIAKNTVYLQMNSLRPEDTALYHCAAGTSTTVRDECGIMYLYDYWAQGTLVTVSS

SEQ ID NO: 281 - protein, 127 aa, synthetic construct
EVQLVESGGGVVQPGGSLRLSCAATGFTLDYYVIGWFRQAPGKEREGVACLSSNGDRINYADSVKGRFTISRDIAKNTVYLQMNSLRPEDTALYHCAAGTSTTVRDFCGIMYLYDYWAQGTLVTVSS

SEQ ID NO: 282 - protein, 127 aa, synthetic construct
EVQLVESGGGVVQPGGSLRLSCAATGFTLDYYVIGWFRQAPGKEREGVACLSSNGDRINYADSVKGRFTISRDIAKNTVYLQMNSLRPEDTALYHCAAGTSTIVRDMCGIMYLYDYWAQGTLVTVSS

SEQ ID NO: 283 - protein, 127 aa, synthetic construct
EVQLVESGGGVVQPGGSLRLSCAATGFTLDYYVIGWFRQAPGKEREGVACLSSNGDRINYADSVKGRFTISRDIAKNTVYLQMNSLRPEDTALYTCAAGTSTTVRDMCGIMYLYDYWAQGTLVTVSS

SEQ ID NO: 284 - protein, 127 aa, synthetic construct
EVQLVESGGGVVQPGGSLRLSCAATGFTLDYYVIGWFRQAPGKEREGVACLSSNGDRINYADSVKGRFTISRDIAKNTVYLQMNSLRPEDTALYLCAAGTSTTVRDMCGIMYLYDYWAQGTLVTVSS

SEQ ID NO: 285 - protein, 127 aa, synthetic construct
EVQLVESGGGVVQPGGSLRLSCAATGFTLDYYVIGWFRQAPGKEREGVACLSSNGDRINYADSVKGRFTISRDIAKNTVYLQMNSLRPEDTALYACAAGTSTTVRDMCGIMYLYDYWAQGTLVTVSS

SEQ ID NO: 286 - protein, 127 aa, synthetic construct
EVQLVESGGGVVQPGGSLRLSCAATGFTLDYYVIGWFRQAPGKEREGVACLSSNGDRINYADSVKGRFTISRDIAKNTVYLQMNSLRPEDTALYICAAGTSTTVRDMCGIMYLYDYWAQGTLVTVSS

SEQ ID NO: 287 - protein, 127 aa, synthetic construct
EVQLVESGGGVVQPGGSLRLSCAATGFTLDYYVIGWFRQAPGKEREGVACLSSNGDRINYADSVKGRFTISRDIAKNTVYLQMNSLRPEDTALYQCAAGTSTTVRDMCGIMYLYDYWAQGTLVTVSS

SEQ ID NO: 288 - protein, 127 aa, synthetic construct
EVQLVESGGGVVQPGGSLRLSCAATGFTLDYYVIGWFRQAPGKEREGVACLSSNGDRINYADSVKGRFTISRDIAKNTVYLQMNSLRPEDTALYECAAGTSTTVRDMCGIMYLYDYWAQGTLVTVSS

SEQ ID NO: 289 - protein, 127 aa, synthetic construct
EVQLVESGGGVVQPGGSLRLSCAATGFTLDYYVIGWFRQAPGKEREGVACLSSNGDRINYADSVKGRFTISRDIAKNTVYLQMNSLRPEDTALYVCAAGTSTTVRDMCGIMYLYDYWAQGTLVTVSS

SEQ ID NO: 290 - protein, 127 aa, synthetic construct
EVQLVESGGGVVQPGGSLRLSCAATGFTLDYYVIGWFRQAPGKEREGVACLSSNGDRINYADSVKGRFTISRDIAKNTVYLQMNSLRPEDTALYKCAAGTSTTVRDMCGIMYLYDYWAQGTLVTVSS

SEQ ID NO: 291 - protein, 127 aa, synthetic construct
EVQLVESGGGVVQPGGSLRLSCAATGFTLDYYVIGWFRQAPGKEREGVACLSSNGDRINYADSVKGRFTISRDIAKNTVYLQMNSLRPEDTALYDCAAGTSTTVRDMCGIMYLYDYWAQGTLVTVSS

SEQ ID NO: 292 - protein, 127 aa, synthetic construct
EVQLVESGGGVVQPGGSLRLSCAATGFTLDYYVIGWFRQAPGKEREGVACLSSNGDRINYADSVKGRFTISRDIAKNTVYLQMNSLRPEDTALYGCAAGTSTTVRDMCGIMYLYDYWAQGTLVTVSS

SEQ ID NO: 293 - protein, 127 aa, synthetic construct
EVQLVESGGGVVQPGGSLRLSCAATGFTLDYYVIGWFRQAPGKEREGVACLSSNGDRINYADSVKGRFTISRDIAKNTVYLQMNSLRPEDTALYRCAAGTSTTVRDMCGIMYLYDYWAQGTLVTVSS

SEQ ID NO: 294 - protein, 127 aa, synthetic construct
EVQLVESGGGVVQPGGSLRLSCAATGFTLDYYVIGWFRQAPGKEREGVACLSSNGDRINYADSVKGRFTISRDIAKNTVYLQMNSLRPEDTALYFCAAGTSTTVRDMCGIMYLYDYWAQGTLVTVSS

SEQ ID NO: 295 - protein, 127 aa, synthetic construct
EVQLVESGGGVVQPGGSLRLSCAATGFTLDYYVIGWFRQAPGKEREGVACLSSNGDRINYADSVKGRFTISRDIAKNTVYLQMNSLRPEDTALYPCAAGTSTTVRDMCGIMYLYDYWAQGTLVTVSS

SEQ ID NO: 296 - protein, 127 aa, synthetic construct
EVQLVESGGGVVQPGGSLRLSCAATGFTLDYYVIGWFRQAPGKEREGVACLSSNGDRIVYADSVKGRFTISRDIAKNTVYLQMNSLRPEDTALYHCAAGTSTTVRDMCGIMYLYDYWAQGTLVTVSS

SEQ ID NO: 297 - protein, 127 aa, synthetic construct
EVQLVESGGGVVQPGGSLRLSCAATGFTLDYYVIGWFRQAPGKEREGVACLSSNGDRIRYADSVKGRFTISRDIAKNTVYLQMNSLRPEDTALYHCAAGTSTTVRDMCGIMYLYDYWAQGTLVTVSS

SEQ ID NO: 298 - protein, 127 aa, synthetic construct
EVQLVESGGGVVQPGGSLRLSCAATGFTLDYYVIGWFRQAPGKEREGVACLSSNGDRIAYADSVKGRFTISRDIAKNTVYLQMNSLRPEDTALYHCAAGTSTTVRDMCGIMYLYDYWAQGTLVTVSS

SEQ ID NO: 299 - protein, 127 aa, synthetic construct
EVQLVESGGGVVQPGGSLRLSCAATGFTLDYYVIGWFRQAPGKEREGVACLSSNGDRISYADSVKGRFTISRDIAKNTVYLQMNSLRPEDTALYHCAAGTSTTVRDMCGIMYLYDYWAQGTLVTVSS

SEQ ID NO: 300 - protein, 127 aa, synthetic construct
EVQLVESGGGVVQPGGSLRLSCAATGFTLDYYVIGWFRQAPGKEREGVACLSSNGDRIDYADSVKGRFTISRDIAKNTVYLQMNSLRPEDTALYHCAAGTSTTVRDMCGIMYLYDYWAQGTLVTVSS

SEQ ID NO: 301 - protein, 127 aa, synthetic construct
EVQLVESGGGVVQPGGSLRLSCAATGFTLDYYVIGWFRQAPGKEREGVACLSSKGDRINYADSVKGRFTISRDIAKNTVYLQMNSLRPEDTALYHCAAGTSTTVRDMCGIMYLYDYWAQGTLVTVSS

SEQ ID NO: 302 - protein, 127 aa, synthetic construct
EVQLVESGGGVVQPGGSLRLSCAATGFTLDYYVIGWFRQAPGKEREGVACLSSNGDRINYADSVKGRFTISRDIAKNTVYLQMNSLRPEDTALYHCAAGTSTTVRDICGIMYLYDYWAQGTLVTVSS

SEQ ID NO: 303 - protein, 127 aa, synthetic construct
EVQLVESGGGVVQPGGSLRLSCAATGFTLDYYVIGWFRQAPGKEREGVACLSSPGDRINYADSVKGRFTISRDIAKNTVYLQMNSLRPEDTALYHCAAGTSTTVRDMCGIMYLYDYWAQGTLVTVSS

SEQ ID NO: 304 - protein, 127 aa, synthetic construct
EVQLVESGGGVVQPGGSLRLSCAATGFTLDYYVIGWFRQAPGKEREGVACLSSYGDRINYADSVKGRFTISRDIAKNTVYLQMNSLRPEDTALYHCAAGTSTTVRDMCGIMYLYDYWAQGTLVTVSS

SEQ ID NO: 305 - protein, 127 aa, synthetic construct
EVQLVESGGGVVQPGGSLRLSCAATGFTLDYYVIGWFRQAPGKEREGVSCLSSNGDRINYADSVKGRFTISRDNAKNTVYLQMNSLRPEDTALYYCAAGTSTTVRDMCGIMYLYDYWAQGTLVTVSS

SEQ ID NO: 306 - protein, 127 aa, synthetic construct
EVQLVESGGGVVQPGGSLRLSCAASGFTLDYYVIGWFRQAPGKEREGVSCLSSNGDRINYADSVKGRFTISRDIAKNTVYLQMNSLRPEDTALYHCAAGTSTTVRDMCGIMYLYDYWGQGTLVTVSS

SEQ ID NO: 307 - protein, 127 aa, synthetic construct
EVQLVESGGGVVQPGGSLRLSCAATGFTLDYYVIGWFRQAPGKEREGVACLSSNGDRINYADSVKGRFTISRDIAKNTVYLQMNSLRPEDTALYYCAAGTSTTVRDMCGIMYLYDYWAQGTLVTVSS

SEQ ID NO: 308 - protein, 127 aa, synthetic construct
EVQLVESGGGVVQPGGSLRLSCAASGFTLDYYVIGWFRQAPGKEREGVACLSSNGDRINYADSVKGRFTISRDNAKNTVYLQMNSLRPEDTALYYCAAGTSTTVRDMCGIMYLYDYWGQGTLVTVSS

SEQ ID NO: 309 - protein, 127 aa, synthetic construct
EVQLVESGGGVVQPGGSLRLSCAASGFTLDYYVIGWFRQAPGKEREGVACLSSNGDRINYADSVKGRFTISRDNAKNTVYLQMNSLRPEDTALYYCAAGTSTTVRDMCGIMYLYDYWAQGTLVTVSS

SEQ ID NO: 310 - protein, 127 aa, synthetic construct
EVQLVESGGGVVQPGGSLRLSCAASGFTLDYYVIGWFRQAPGKEREGVACLSSNGDRINYADSVKGRFTISRDNAKNTVYLQMNSLRPEDTALYHCAAGTSTTVRDMCGIMYLYDYWAQGTLVTVSS

SEQ ID NO: 311 - protein, 127 aa, synthetic construct
EVQLVESGGGVVQPGGSLRLSCAATGFTLDYYVIGWFRQAPGKEREGVSCLSSNGDRINYADSVKGRFTISRDIAKNTVYLQMNSLRPEDTALYHCAAGTSTTVRDMCGIMYLYDYWAQGTLVTVSS

SEQ ID NO: 312 - protein, 127 aa, synthetic construct
EVQLVESGGGVVQPGGSLRLSCAASGFTLDYYVIGWFRQAPGKEREGVSCLSSNGDRINYADSVKGRFTISRDNAKNTVYLQMNSLRPEDTALYHCAAGTSTTVRDMCGIMYLYDYWAQGTLVTVSS

SEQ ID NO: 313 - protein, 127 aa, synthetic construct
EVQLVESGGGVVQPGGSLRLSCAASGFTLDYYVIGWFRQAPGKEREGVSCLSSNGDRINYADSVKGRFTISRDNAKNTVYLQMNSLRPEDTALYHCAAGTSTTVRDMCGIMYLYDYWGQGTLVTVSS

SEQ ID NO: 314 - protein, 127 aa, synthetic construct
EVQLVESGGGVVQPGGSLRLSCAATGFTLDYYVIGWFRQAPGKEREGVACLSSNGDRINYADSVKGRFTISRDNAKNTVYLQMNSLRPEDTALYYCAAGTSTTVRDMCGIMYLYDYWGQGTLVTVSS

SEQ ID NO: 315 - protein, 127 aa, synthetic construct
EVQLVESGGGVVQPGGSLRLSCAATGFTLDYYVIGWFRQAPGKEREGVSCLSSNGDRINYADSVKGRFTISRDNAKNTVYLQMNSLRPEDTALYYCAAGTSTTVRDMCGIMYLYDYWGQGTLVTVSS

SEQ ID NO: 316 - protein, 127 aa, synthetic construct
EVQLVESGGGVVQPGGSLRLSCAASGFTLDYYVIGWFRQAPGKEREGVACLSSNGDRINYADSVKGRFTISRDIAKNTVYLQMNSLRPEDTALYYCAAGTSTTVRDMCGIMYLYDYWGQGTLVTVSS

SEQ ID NO: 317 - protein, 127 aa, synthetic construct
EVQLVESGGGVVQPGGSLRLSCAATGFTLDYYVIGWFRQAPGKEREGVACLSSNGDRINYADSVKGRFTISRDIAKNTVYLQMNSLRPEDTALYYCAAGTSTTVRDMCGIMYLYDYWGQGTLVTVSS

SEQ ID NO: 318 - protein, 127 aa, synthetic construct
EVQLVESGGGVVQPGGSLRLSCAATGFTLDYYVIGWFRQAPGKEREGVSCLSSNGDRINYADSVKGRFTISRDIAKNTVYLQMNSLRPEDTALYHCAAGTSTTVRDMCGIMYLYDYWGQGTLVTVSS

SEQ ID NO: 319 - protein, 127 aa, synthetic construct
EVQLVESGGGVVQPGGSLRLSCAASGFTLDYYVIGWFRQAPGKEREGVSCLSSNGDRINYADSVKGRFTISRDNAKNTVYLQMNSLRPEDTALYYCAAGTSTTVRDMCGIMYLYDYWGQGTLVTVSS

SEQ ID NO: 320 - protein, 127 aa, synthetic construct
EVQLVESGGGVVQPGGSLRLSCAASGFTLDYYVIGWFRQAPGKEREGVSCLSSNGDRINYADSVKGRFTISRDNAKNTVYLQMNSLRPEDTALYYCAAGTSTTVRDMCGIMYLYDYWAQGTLVTVSS

SEQ ID NO: 321 - protein, 127 aa, synthetic construct
EVQLVESGGGVVQPGGSLRLSCAATGFTLDYYVIGWFRQAPGKEREGVACLSSNGDRINYADSVKGRFTISRDIAKNTVDLQMNSLRPEDTALYHCAAGTSTTVRDMCGIMYLYDYWAQGTLVTVSS

SEQ ID NO: 322 - protein, 127 aa, synthetic construct
EVQLVESGGGVVQPGGSLRLSCAATGFTLDYYVIGWFRQAPGKEREGVACLSSNGDRINYADSVKGRFTISRDNAKNTVYLQMNSLRPEDTALYYCAAGTSTTVRDMCGIMYLYDYWAQGTLVTVSS

SEQ ID NO: 323 - protein, 127 aa, synthetic construct
EVQLVESGGGVVQPGGSLRLSCAATGFTLDYYVIGWFRQAPGKEREGVSCLSSNGDRINYADSVKGRFTISRDNAKNTVYLQMNSLRPEDTALYHCAAGTSTTVRDMCGIMYLYDYWGQGTLVTVSS

SEQ ID NO: 324 - protein, 127 aa, synthetic construct
EVQLVESGGGVVQPGGSLRLSCAATGFTLDYYVIGWFRQAPGKEREGVACLSSNGDRINYADSVKGRFTISRDNAKNTVYLQMNSLRPEDTALYHCAAGTSTTVRDMCGIMYLYDYWGQGTLVTVSS

SEQ ID NO: 325 - protein, 127 aa, synthetic construct
EVQLVESGGGVVQPGGSLRLSCAASGFTLDYYVIGWFRQAPGKEREGVSCLSSNGDRINYADSVKGRFTISRDIAKNTVYLQMNSLRPEDTALYYCAAGTSTTVRDMCGIMYLYDYWAQGTLVTVSS

SEQ ID NO: 326 - protein, 127 aa, synthetic construct
EVQLVESGGGVVQPGGSLRLSCAASGFTLDYYVIGWFRQAPGKEREGVACLSSNGDRINYADSVKGRFTISRDIAKNTVYLQMNSLRPEDTALYYCAAGTSTTVRDMCGIMYLYDYWAQGTLVTVSS

SEQ ID NO: 327 - protein, 127 aa, synthetic construct
EVQLVESGGGVVQPGGSLRLSCAATGFTLDYYVIGWFRQAPGKEREGVSCLSSNGDRINYADSVKGRFTISRDIAKNTVYLQMNSLRPEDTALYYCAAGTSTTVRDMCGIMYLYDYWGQGTLVTVSS

SEQ ID NO: 328 - protein, 127 aa, synthetic construct
DVQLVESGGGVVQPGGSLRLSCAATGFTLDYYVIGWFRQAPGKEREGVACLSSNGDRINYADSVKGRFTISRDNAKNTVYLQMNSLRPEDTALYHCAAGTSTTVRDMCGIMYLYDYWAQGTLVTVSS

SEQ ID NO: 329 - protein, 127 aa, synthetic construct
DVQLVESGGGVVQPGGSLRLSCAATGFTLDYYVIGWFRQAPGKEREGVACLSSNGDRINYADSVKGRFTISRDIAKNTVYLQMNSLRPEDTALYHCAAGTSTTVRDMCGIAYLYDYWAQGTLVTVSS

SEQ ID NO: 330 - protein, 127 aa, synthetic construct
DVQLVESGGGVVQPGGSLRLSCAATGFTLDYYVIGWFRQAPGKEREGVACLSSNGDRINYADSVKGRFTISRDIAKNTVYLQMNSLRPEDTALYHCAAGTSTTVRDACGIMYLYDYWAQGTLVTVSS

SEQ ID NO: 331 - protein, 127 aa, synthetic construct
EVQLVESGGGVVQPGGSLRLSCAASGFTLDYYVIGWFRQAPGKEREGVACLSSNGDRINYADSVKGRFTISRDIAKNTVYLQMNSLRPEDTALYHCAAGTSTTVRDMCGIMYLYDYWGQGTLVTVSS

SEQ ID NO: 332 - protein, 127 aa, synthetic construct
EVQLVESGGGVVQPGGSLRLSCAASGFTLDYYVIGWFRQAPGKEREGVACLSSNGDRINYADSVKGRFTISRDIAKNTVYLQMNSLRPEDTALYHCAAGTSTTVRDMCGIMYLYDYWAQGTLVTVSS

SEQ ID NO: 333 - protein, 127 aa, synthetic construct
EVQLVESGGGVVQPGGSLRLSCAASGFTLDYYVIGWFRQAPGKEREGVSCLSSNGDRINYADSVKGRFTISRDIAKNTVYLQMNSLRPEDTALYHCAAGTSTTVRDMCGIMYLYDYWAQGTLVTVSS

SEQ ID NO: 334 - protein, 127 aa, synthetic construct
EVQLVESGGGVVQPGGSLRLSCAATGFTLDYYVIGWFRQAPGKEREGVACLSSNGDRINYADSVKGRFTISRDNAKNTVYLQMNSLRPEDTALYHCAAGTSTTVRDMCGIMYLYDYWAQGTLVTVSS

SEQ ID NO: 335 - protein, 127 aa, synthetic construct
EVQLVESGGGVVQPGGSLRLSCAATGFTLDYYVIGWFRQAPGKEREGVACLSSEGDRINYADSVKGRFTISRDIAKNTVYLQMNSLRPEDTALYHCAAGTSTTVRDMCGIMYLYDYWAQGTLVTVSS

SEQ ID NO: 336 - protein, 127 aa, synthetic construct
EVQLVESGGGVVQPGGSLRLSCAATGFTLDYYVIGWFRQAPGKEREGVACLSSGGDRINYADSVKGRFTISRDIAKNTVYLQMNSLRPEDTALYHCAAGTSTTVRDMCGIMYLYDYWAQGTLVTVSS

SEQ ID NO: 337 - protein, 127 aa, synthetic construct
EVQLVESGGGVVQPGGSLRLSCAATGFTLDYYVIGWFRQAPGKEREGVACLSSDGDRINYADSVKGRFTISRDIAKNTVYLQMNSLRPEDTALYHCAAGTSTTVRDMCGIMYLYDYWAQGTLVTVSS

SEQ ID NO: 338 - protein, 127 aa, synthetic construct
EVQLVESGGGVVQPGGSLRLSCAATGFTLDYYVIGWFRQAPGKEREGVACLSSSGDRINYADSVKGRFTISRDIAKNTVYLQMNSLRPEDTALYHCAAGTSTTVRDMCGIMYLYDYWAQGTLVTVSS

SEQ ID NO: 339 - protein, 127 aa, synthetic construct
EVQLVESGGGVVQPGGSLRLSCAATGFTLDYYVIGWFRQAPGKEREGVACLSSIGDRINYADSVKGRFTISRDIAKNTVYLQMNSLRPEDTALYHCAAGTSTTVRDMCGIMYLYDYWAQGTLVTVSS

SEQ ID NO: 340 - protein, 127 aa, synthetic construct
EVQLVESGGGVVQPGGSLRLSCAATGFTLDDYVIGWFRQAPGKEREGVACLSSNGDRINYADSVKGRFTISRDIAKNTVYLQMNSLRPEDTALYHCAAGTSTTVRDMCGIMYLYDYWAQGTLVTVSS

SEQ ID NO: 341 - protein, 127 aa, synthetic construct
EVQLVESGGGVVQPGGSLRLSCAATGFTLDQYVIGWFRQAPGKEREGVACLSSNGDRINYADSVKGRFTISRDIAKNTVYLQMNSLRPEDTALYHCAAGTSTTVRDMCGIMYLYDYWAQGTLVTVSS

SEQ ID NO: 342 - protein, 127 aa, synthetic construct
EVQLVESGGGVVQPGGSLRLSCAATGFTLDAYVIGWFRQAPGKEREGVACLSSNGDRINYADSVKGRFTISRDIAKNTVYLQMNSLRPEDTALYHCAAGTSTTVRDMCGIMYLYDYWAQGTLVTVSS

SEQ ID NO: 343 - protein, 127 aa, synthetic construct
EVQLVESGGGVVQPGGSLRLSCAATGFTLDPYVIGWFRQAPGKEREGVACLSSNGDRINYADSVKGRFTISRDIAKNTVYLQMNSLRPEDTALYHCAAGTSTTVRDMCGIMYLYDYWAQGTLVTVSS

SEQ ID NO: 344 - protein, 127 aa, synthetic construct
EVQLVESGGGVVQPGGSLRLSCAATGFTLDSYVIGWFRQAPGKEREGVACLSSNGDRINYADSVKGRFTISRDIAKNTVYLQMNSLRPEDTALYHCAAGTSTTVRDMCGIMYLYDYWAQGTLVTVSS

SEQ ID NO: 345 - protein, 127 aa, synthetic construct
EVQLVESGGGVVQPGGSLRLSCAATGFTLDGYVIGWFRQAPGKEREGVACLSSNGDRINYADSVKGRFTISRDIAKNTVYLQMNSLRPEDTALYHCAAGTSTTVRDMCGIMYLYDYWAQGTLVTVSS

SEQ ID NO: 346 - protein, 127 aa, synthetic construct
EVQLVESGGGVVQPGGSLRLSCAATGFTLDTYVIGWFRQAPGKEREGVACLSSNGDRINYADSVKGRFTISRDIAKNTVYLQMNSLRPEDTALYHCAAGTSTTVRDMCGIMYLYDYWAQGTLVTVSS

SEQ ID NO: 347 - protein, 127 aa, synthetic construct
EVQLVESGGGVVQPGGSLRLSCAATGFTLDVYVIGWFRQAPGKEREGVACLSSNGDRINYADSVKGRFTISRDIAKNTVYLQMNSLRPEDTALYHCAAGTSTTVRDMCGIMYLYDYWAQGTLVTVSS

SEQ ID NO: 348 - protein, 127 aa, synthetic construct
EVQLVESGGGVVQPGGSLRLSCAATGFTLDIYVIGWFRQAPGKEREGVACLSSNGDRINYADSVKGRFTISRDIAKNTVYLQMNSLRPEDTALYHCAAGTSTTVRDMCGIMYLYDYWAQGTLVTVSS

SEQ ID NO: 349 - protein, 127 aa, synthetic construct
EVQLVESGGGVVQPGGSLRLSCAATGFTLDRYVIGWFRQAPGKEREGVACLSSNGDRINYADSVKGRFTISRDIAKNTVYLQMNSLRPEDTALYHCAAGTSTTVRDMCGIMYLYDYWAQGTLVTVSS

SEQ ID NO: 350 - protein, 127 aa, synthetic construct
EVQLVESGGGVVQPGGSLRLSCAATGFTLDKYVIGWFRQAPGKEREGVACLSSNGDRINYADSVKGRFTISRDIAKNTVYLQMNSLRPEDTALYHCAAGTSTTVRDMCGIMYLYDYWAQGTLVTVSS

SEQ ID NO: 351 - protein, 127 aa, synthetic construct
EVQLVESGGGVVQPGGSLRLSCAATGFTLDEYVIGWFRQAPGKEREGVACLSSNGDRINYADSVKGRFTISRDIAKNTVYLQMNSLRPEDTALYHCAAGTSTTVRDMCGIMYLYDYWAQGTLVTVSS

SEQ ID NO: 352 - protein, 127 aa, synthetic construct
EVQLVESGGGVVQPGGSLRLSCAATGFTLDLYVIGWFRQAPGKEREGVACLSSNGDRINYADSVKGRFTISRDIAKNTVYLQMNSLRPEDTALYHCAAGTSTTVRDMCGIMYLYDYWAQGTLVTVSS

SEQ ID NO: 353 - protein, 127 aa, synthetic construct
EVQLVESGGGVVQPGGSLRLSCAATGFTLDHYFIGWFRQAPGKEREGVACLSSNGDRINYADSVKGRFTISRDIAKNTVYLQMNSLRPEDTALYHCAAGTSTTVRDMCGIMYLYDYWAQGTLVTVSS

SEQ ID NO: 354 - protein, 127 aa, synthetic construct
EVQLVESGGGVVQPGGSLRLSCAATGFTLDFYVIGWFRQAPGKEREGVACLSSNGDRINYADSVKGRFTISRDIAKNTVYLQMNSLRPEDTALYHCAAGTSTTVRDMCGIMYLYDYWAQGTLVTVSS

SEQ ID NO: 355 - protein, 127 aa, synthetic construct
EVQLVESGGGVVQPGGSLRLSCAATGFTLDYYVIGWFRQAPGKEREGVSCLSSNGDRINYADSVKGRFTISRDNAKNTVYLQMNSLRPEDTALYHCAAGTSTTVRDMCGIMYLYDYWAQGTLVTVSS

SEQ ID NO: 356 - protein, 127 aa, synthetic construct
EVQLVESGGGVVQPGGSLRLSCAASGFTLDYYVIGWFRQAPGKEREGVACLSSNGDRINYADSVKGRFTISRDNAKNTVYLQMNSLRPEDTALYHCAAGTSTTVRDMCGIMYLYDYWGQGTLVTVSS

SEQ ID NO: 357 - protein, 127 aa, synthetic construct
EVQLVESGGGVVQPGGSLRLSCAATGFTLDYYVIGWFRQAPGKEREGVSCLSSNGDRINYADSVKGRFTISRDIAKNTVYLQMNSLRPEDTALYYCAAGTSTTVRDMCGIMYLYDYWAQGTLVTVSS

SEQ ID NO: 358 - protein, 127 aa, synthetic construct
EVQLVESGGGVVQPGGSLRLSCAATGFTLDYYVIGWFRQAPGKEREGVACLSSNGDRINYADSVKGRFTISRDIAKNTVSLQMNSLRPEDTALYHCAAGTSTTVRDMCGIMYLYDYWAQGTLVTVSS

SEQ ID NO: 359 - protein, 127 aa, synthetic construct
EVQLVESGGGVVQPGGSLRLSCAATGFTLDYYVIGWFRQAPGKEREGVACLSSNGDRINYADSVKGRFTISRDIAKNTVYLQMNSLRPEDTALYHCAAGTSTTVRDMCGIMYLYDYWGQGTLVTVSS

SEQ ID NO: 360 - protein, 127 aa, synthetic construct
EVQLVESGGGVVQPGGSLRLSCAASGFTLDYYVIGWFRQAPGKEREGVSCLSSNGDRINYADSVKGRFTISRDIAKNTVYLQMNSLRPEDTALYYCAAGTSTTVRDMCGIMYLYDYWGQGTLVTVSS

SEQ ID NO: 361 - protein, 127 aa, synthetic construct
EVQLVESGGGVVQPGGSLRLSCAATGFTLDYYVIGWFRQAPGKEREGVACLSSNGDRINYADSVKGRFTISRDIAKNTVYLQMNSLRPEDTALYHCAAGTSTTVRDMCGIMYLYDYWAQGTLVTVSS

SEQ ID NO: 362 - protein, 127 aa, synthetic construct
EVQLVESGGGVVQPGGSLRLSCAATGFTLDYYVIGWFRQAPGKEREGVACLSSAGDRINYADSVKGRFTISRDIAKNTVYLQMNSLRPEDTALYHCAAGTSTTVRDMCGIMYLYDYWAQGTLVTVSS

SEQ ID NO: 363 - protein, 127 aa, synthetic construct
EVQLVESGGGVVQPGGSLRLSCAATGFTLDYYVIGWFRQAPGKEREGVACLSSNGDRINYADSVKGRFTISRDIAKNTVYLQMNSLRPEDTALYHCAAGTSTTVRDPCGIMYLYDYWAQGTLVTVSS

SEQ ID NO: 364 - protein, 127 aa, synthetic construct
EVQLVESGGGVVQPGGSLRLSCAATGFTLDYYVIGWFRQAPGKEREGVACLSSNGDRIKYADSVKGRFTISRDIAKNTVYLQMNSLRPEDTALYHCAAGTSTTVRDMCGIMYLYDYWAQGTLVTVSS

SEQ ID NO: 365 - protein, 127 aa, synthetic construct
EVQLVESGGGVVQPGGSLRLSCAATGFTLDYYVIGWFRQAPGKEREGVACLSSNGDRIFYADSVKGRFTISRDIAKNTVYLQMNSLRPEDTALYHCAAGTSTTVRDMCGIMYLYDYWAQGTLVTVSS

SEQ ID NO: 366 - protein, 127 aa, synthetic construct
EVQLVESGGGVVQPGGSLRLSCAATGFTLDYYVIGWFRQAPGKEREGVACLSSNGDRINYADSVKGRFTISRDIAKNTVYLQMNSLRPEDTALYHCAAGTSTTVRDRCGIMYLYDYWAQGTLVTVSS

SEQ ID NO: 367 - protein, 127 aa, synthetic construct
EVQLVESGGGVVQPGGSLRLSCAASGFTLDYYVIGWFRQAPGKEREGVACLSSEGDRINYADSVKGRFTISRDIAKNTVYLQMNSLRPEDTALYHCAAGTSTTVRDLCGILYLYDYWGQGTLVTVSS

SEQ ID NO: 368 - protein, 127 aa, synthetic construct
EVQLVESGGGVVQPGGSLRLSCAASGFTLDYYVIGWFRQAPGKEREGVACLSSEGDRINYADSVKGRFTISRDIAKNTVYLQMNSLRPEDTALYHCAAGTSTTVRDMCGIIYLYDYWAQGTLVTVSS

SEQ ID NO: 369 - protein, 127 aa, synthetic construct
EVQLVESGGGVVQPGGSLRLSCAASGFTLDYYVIGWFRQAPGKEREGVACLSSEGDRINYADSVKGRFTISRDIAKNTVYLQMNSLRPEDTALYHCAAGTSTTVRDVCGILYLYDYWAQGTLVTVSS

SEQ ID NO: 370 - protein, 127 aa, synthetic construct
EVQLVESGGGVVQPGGSLRLSCAASGFTLDYYVIGWFRQAPGKEREGVACLSSEGDRINYADSVKGRFTISRDIAKNTVYLQMNSLRPEDTALYHCAAGTSTTVRDMCGILYLYDYWAQGTLVTVSS

SEQ ID NO: 371 - protein, 127 aa, synthetic construct
EVQLVESGGGVVQPGGSLRLSCAASGFTLDYYVIGWFRQAPGKEREGVACLSSEGDRINYADSVKGRFTISRDIAKNTVYLQMNSLRPEDTALYHCAAGTSTTVRDICGIFYLYDYWAQGTLVTVSS

SEQ ID NO: 372 - protein, 127 aa, synthetic construct
EVQLVESGGGVVQPGGSLRLSCAASGFTLDYYVIGWFRQAPGKEREGVACLSSEGDRINYADSVKGRFTISRDIAKNTVYLQMNSLRPEDTALYHCAAGTSTTVRDECGIFYLYDYWAQGTLVTVSS

SEQ ID NO: 373 - protein, 127 aa, synthetic construct
EVQLVESGGGVVQPGGSLRLSCAASGFTLDYYVIGWFRQAPGKEREGVACLSSEGDRINYADSVKGRFTISRDIAKNTVYLQMNSLRPEDTALYHCAAGTSTTVRDVCGIFYLYDYWAQGTLVTVSS

SEQ ID NO: 374 - protein, 127 aa, synthetic construct
EVQLVESGGGVVQPGGSLRLSCAASGFTLDYYVIGWFRQAPGKEREGVACLSSEGDRINYADSVKGRFTISRDIAKNTVYLQMNSLRPEDTALYHCAAGTSTTVRDMCGIFYLYDYWAQGTLVTVSS

SEQ ID NO: 375 - protein, 127 aa, synthetic construct
EVQLVESGGGVVQPGGSLRLSCAASGFTLDYYVIGWFRQAPGKEREGVACLSSEGDRINYADSVKGRFTISRDIAKNTVYLQMNSLRPEDTALYHCAAGTSTTVRDLCGIMYLYDYWAQGTLVTVSS

SEQ ID NO: 376 - protein, 127 aa, synthetic construct
EVQLVESGGGVVQPGGSLRLSCAASGFTLDYYVIGWFRQAPGKEREGVACLSSEGDRINYADSVKGRFTISRDIAKNTVYLQMNSLRPEDTALYHCAAGTSTTVRDECGIMYLYDYWAQGTLVTVSS

SEQ ID NO: 377 - protein, 127 aa, synthetic construct
EVQLVESGGGVVQPGGSLRLSCAASGFTLDYYVIGWFRQAPGKEREGVACLSSEGDRINYADSVKGRFTISRDIAKNTVYLQMNSLRPEDTALYHCAAGTSTTVRDVCGIMYLYDYWAQGTLVTVSS

SEQ ID NO: 378 - protein, 127 aa, synthetic construct
EVQLVESGGGVVQPGGSLRLSCAASGFTLDYYVIGWFRQAPGKEREGVACLSSGGDRINYADSVKGRFTISRDIAKNTVYLQMNSLRPEDTALYHCAAGTSTTVRDVCGIFYLYDYWGQGTLVTVSS

SEQ ID NO: 379 - protein, 127 aa, synthetic construct
EVQLVESGGGVVQPGGSLRLSCAASGFTLDYYVIGWFRQAPGKEREGVACLSSEGDRINYADSVKGRFTISRDIAKNTVYLQMNSLRPEDTALYHCAAGTSTTVRDVCGILYLYDYWGQGTLVTVSS

SEQ ID NO: 380 - protein, 127 aa, synthetic construct
EVQLVESGGGVVQPGGSLRLSCAASGFTLDYYVIGWFRQAPGKEREGVACLSSEGDRINYADSVKGRFTISRDIAKNTVDLQMNSLRPEDTALYHCAAGTSTTVRDLCGIMYLYDIWAQGTLVTVSS

SEQ ID NO: 381 - protein, 127 aa, synthetic construct
EVQLVESGGGVVQPGGSLRLSCAASGFTLDYYVIGWFRQAPGKEREGVACLSSEGDRINYADSVKGRFTISRDIAKNTVYLQMNSLRPEDTALYHCAAGTSTTVRDICGIIYLYDYWAQGTLVTVSS

SEQ ID NO: 382 - protein, 127 aa, synthetic construct
EVQLVESGGGVVQPGGSLRLSCAASGFTLDYYVIGWFRQAPGKEREGVACLSSEGDRINYADSVKGRFTISRDIAKNTVYLQMNSLRPEDTALYHCAAGTSTTVRDVCGIMYLYDYWGQGTLVTVSS

SEQ ID NO: 383 - protein, 127 aa, synthetic construct
EVQLVESGGGVVQPGGSLRLSCAASGFTLDYYVIGWFRQAPGKEREGVACLSSEGDRINYADSVKGRFTISRDIAKNTVYLQMNSLRPEDTALYHCAAGTSTTVRDVCGIFYLYDYWGQGTLVTVSS

SEQ ID NO: 384 - protein, 127 aa, synthetic construct
EVQLVESGGGVVQPGGSLRLSCAASGFTLDYYVIGWFRQAPGKEREGVACLSSGGDRINYADSVKGRFTISRDIAKNTVYLQMNSLRPEDTALYHCAAGTSTTVRDECGIFYLYDYWGQGTLVTVSS

SEQ ID NO: 385 - protein, 127 aa, synthetic construct
EVQLVESGGGVVQPGGSLRLSCAASGFTLDYYVIGWFRQAPGKEREGVACLSSGGDRINYADSVKGRFTISRDIAKNTVYLQMNSLRPEDTALYHCAAGTSTTVRDLCGILYLYDYWGQGTLVTVSS

SEQ ID NO: 386 - protein, 127 aa, synthetic construct
EVQLVESGGGVVQPGGSLRLSCAATGFTLDYYVIGWFRQAPGKEREGVACLSSNGDRINYADSVKGRFTISRDIAKNTVYLQMNSLRPEDTALYHCAAGFSTTVRDMCGIMYLYDYWAQGTLVTVSS

SEQ ID NO: 387 - protein, 127 aa, synthetic construct
EVQLVESGGGVVQPGGSLRLSCAATGFTLDYYVIGWFRQAPGKEREGVACLSSNGDRINYADSVKGRFTISRDIAKNTVYLQMNSLRPEDTALYHCAAGGSTTVRDICGIMYLYDYWAQGTLVTVSS

SEQ ID NO: 388 - protein, 127 aa, synthetic construct
EVQLVESGGGVVQPGGSLRLSCAATGFTLDYYVIGWFRQAPGKERKGVACLSSNGDRINYADSVKGRFTISRDIAKNTVYLQMNSLRPEDTALYHCAAGSSTTVRDMCGIMYLYDYWAQGTLVTVSS

SEQ ID NO: 389 - protein, 127 aa, synthetic construct
EVQLVESGGGVVQPGGSLRLSCAATGFTLDYYVIGWFRQAPGKEREGVACLSSNGDRINYADSVKGRFTISRDIAKNTVYLQMNSLRPEDTALYHCAAGSSTTVRDMCGIMYLYDYWAQGTLVTVSS

SEQ ID NO: 390 - protein, 127 aa, synthetic construct
EVQLVESGGGVVQPGGSLRLSCAATGFTLDYYVIGWFRQAPGKEREGVACLSSNGDRINYADSVKGRFTISRDIAKNTVYLQMNSLRPEDTALYHCAAGESTTVRDMCGIMYLYDYWAQGTLVTVSS

SEQ ID NO: 391 - protein, 127 aa, synthetic construct
EVQLVESGGGVVQPGGSLRLSCAATGFTLDYYVIGWFRQAPGKEREGVACLSSNGDRINYADSVKGRFTISRDIAKNTVYLQMNSLRPEDTALYHCAAGVSTTVRDMCGIMYLYDYWAQGTLVTVSS

SEQ ID NO: 392 - protein, 127 aa, synthetic construct
EVQLVESGGGVVQPGGSLRLSCAATGFTLDYYVIGWFRQAPGKEREGVACLSSNGDRINYADSVKGRFTISRDIAKNTVYLQMNSLRPEDTALYHCAAGYSTTVRDMCGIMYLYDYWAQGTLVTVSS

SEQ ID NO: 393 - protein, 127 aa, synthetic construct
EVQLVESGGGVVQPGGSLRLSCAATGFTLDYYVIGWFRQAPGKEREGVACLSSNGDRINYADSVKGRFTISRDIAKNTVYLQMNSLRPEDTALYHCAAGPSTTVRDVCGIMYLYDYWAQGTLVTVSS

SEQ ID NO: 394 - protein, 127 aa, synthetic construct
EVQLVESGGGVVQPGGSLRLSCAASGFTLDYYVIGWFRQAPGKEREGVACLSSEGDRINYADSVKGRFTISRDIAKNTVYLQMNSLRPEDTALYHCAAGTSTTVRDVCGIIYLYDYWAQGTLVTVSS

SEQ ID NO: 395 - protein, 127 aa, synthetic construct
EVQLVESGGGVVQPGGSLRLSCAATGFTLDYYVIGWFRQAPGKEREGVACLSSNGDRINYADSVKGRFTISRDIAKNTVYLQMNSLRPEDTALYHCAAGISTTVRDMCGIMYLYDYWAQGTLVTVSS

SEQ ID NO: 396 - protein, 127 aa, synthetic construct
EVQLVESGGGVVQPGGSLRLSCAATGFTLDYYVIGWFRQAPGKEREGVACLSSNGDRINYADSVKGRFTISRDIAKNTVYLQMNSLRPEDTALYHCAAGDSTTVRDMCGIMYLYDYWAQGTLVTVSS

SEQ ID NO: 397 - protein, 127 aa, synthetic construct
EVQLVESGGGVVQPGGSLRLSCAASGFTLDYYVIGWFRQAPGKEREGVACLSSEGDRINYADSVKGRFTISRDIAKNTVYLQMNSLRPEDTALYHCAAGTSTTVRDECGIFYLYDYWGQGTLVTVSS

SEQ ID NO: 398 - protein, 127 aa, synthetic construct
EVQLVESGGGVVQPGGSLRLSCAATGFTLDYYVIGWFRQAPGKEREGVACLSSNGDRINYADSVKGRFTISRDIAKNTVYLQMNSLRPEDTALYHCAAGGSTTVRDMCGIMYLYDYWAQGTLVTVSS

SEQ ID NO: 399 - protein, 127 aa, synthetic construct
EVQLVESGGGVVQPGGSLRLSCAASGFTLDYYVIGWFRQAPGKEREGVACLSSEGDRINYADSVKGRFTISRDIAKNTVSLQMNSLRPEDTALYHCAAGTSTTVRDLCGIMYLYDLWAQGTLVTVSS

SEQ ID NO: 400 - protein, 127 aa, synthetic construct
EVQLVESGGGVVQPGGSLRLSCAASGFTLDYYVIGWFRQAPGKEREGVACLSSEGDRINYADSVKGRFTISRDIAKNTVSLQMNSLRPEDTALYHCAAGTSTTVRDLCGIMYLYDVWAQGTLVTVSS

SEQ ID NO: 401 - protein, 127 aa, synthetic construct
EVQLVESGGGVVQPGGSLRLSCAASGFTLDYYVIGWFRQAPGKEREGVACLSSEGDRINYADSVKGRFTISRDIAKNTVDLQMNSLRPEDTALYHCAAGTSTTVRDLCGIMYLYDVWAQGTLVTVSS

SEQ ID NO: 402 - protein, 127 aa, synthetic construct
EVQLVESGGGLVQSGGSLRLSCAATGFTLDYYVIGWFRQAPGKEREGVACLSSNGDRINYADSVKGRFTISRDIAKNTVYLQMNSLKPEDTAVYHCAAGTSTTVRDMCGIMYLYDYWAQGTLVTVSS

SEQ ID NO: 403 - protein, 127 aa, synthetic construct
EVQLVESGGGVVQPGGSLRLSCAASGFTLDYYVIGWFRQAPGKEREGVACLSSGGDRINYADSVKGRFTISRDIAKNTVYLQMNSLRPEDTALYHCAAGTSTTVRDVCGIIYLYDYWAQGTLVTVSS

SEQ ID NO: 404 - protein, 127 aa, synthetic construct
EVQLVESGGGVVQPGGSLRLSCAASGFTLDYYVIGWFRQAPGKEREGVACLSSGGDRINYADSVKGRFTISRDIAKNTVYLQMNSLRPEDTALYHCAAGTSTTVRDLCGILYLYDYWAQGTLVTVSS

SEQ ID NO: 405 - protein, 127 aa, synthetic construct
EVQLVESGGGVVQPGGSLRLSCAASGFTLDYYVIGWFRQAPGKEREGVACLSSGGDRINYADSVKGRFTISRDIAKNTVYLQMNSLRPEDTALYHCAAGTSTTVRDVCGILYLYDYWAQGTLVTVSS

SEQ ID NO: 406 - protein, 127 aa, synthetic construct
EVQLVESGGGVVQPGGSLRLSCAASGFTLDYYVIGWFRQAPGKEREGVACLSSGGDRINYADSVKGRFTISRDIAKNTVYLQMNSLRPEDTALYHCAAGTSTTVRDECGIFYLYDYWAQGTLVTVSS

SEQ ID NO: 407 - protein, 127 aa, synthetic construct
EVQLVESGGGVVQPGGSLRLSCAASGFTLDYYVIGWFRQAPGKEREGVACLSSGGDRINYADSVKGRFTISRDIAKNTVYLQMNSLRPEDTALYHCAAGTSTTVRDVCGIFYLYDYWAQGTLVTVSS

SEQ ID NO: 408 - protein, 127 aa, synthetic construct
EVQLVESGGGVVQPGGSLRLSCAASGFTLDYYVIGWFRQAPGKEREGVACLSSGGDRINYADSVKGRFTISRDIAKNTVYLQMNSLRPEDTALYHCAAGTSTTVRDLCGIMYLYDYWGQGTLVTVSS

SEQ ID NO: 409 - protein, 127 aa, synthetic construct
EVQLVESGGGVVQPGGSLRLSCAASGFTLDYYVIGWFRQAPGKEREGVACLSSGGDRINYADSVKGRFTISRDIAKNTVYLQMNSLRPEDTALYHCAAGTSTTVRDECGIMYLYDYWGQGTLVTVSS

SEQ ID NO: 410 - protein, 127 aa, synthetic construct
EVQLVESGGGVVQPGGSLRLSCAASGFTLDYYVIGWFRQAPGKEREGVACLSSGGDRINYADSVKGRFTISRDIAKNTVYLQMNSLRPEDTALYHCAAGTSTTVRDVCGIMYLYDYWGQGTLVTVSS

SEQ ID NO: 411 - protein, 127 aa, synthetic construct
EVQLVESGGGVVQPGGSLRLSCAASGFTLDYYVIGWFRQAPGKEREGVACLSSGGDRINYADSVKGRFTISRDIAKNTVYLQMNSLRPEDTALYHCAAGTSTTVRDLCGIMYLYDYWAQGTLVTVSS

SEQ ID NO: 412 - protein, 127 aa, synthetic construct
EVQLVESGGGVVQPGGSLRLSCAASGFTLDYYVIGWFRQAPGKEREGVACLSSGGDRINYADSVKGRFTISRDIAKNTVYLQMNSLRPEDTALYHCAAGTSTTVRDECGIMYLYDYWAQGTLVTVSS

SEQ ID NO: 413 - protein, 127 aa, synthetic construct
EVQLVESGGGVVQPGGSLRLSCAASGFTLDYYVIGWFRQAPGKEREGVACLSSGGDRINYADSVKGRFTISRDIAKNTVYLQMNSLRPEDTALYHCAAGTSTTVRDVCGIMYLYDYWAQGTLVTVSS

SEQ ID NO: 414 - protein, 127 aa, synthetic construct
EVQLVESGGGVVQPGGSLRLSCAASGFTLDYYVIGWFRQAPGKEREGVACLSSGGDRINYADSVKGRFTISRDIAKNTVYLQMNSLRPEDTALYHCAAGTSTTVRDMCGILYLYDYWGQGTLVTVSS

SEQ ID NO: 415 - protein, 127 aa, synthetic construct
EVQLVESGGGVVQPGGSLRLSCAASGFTLDYYVIGWFRQAPGKEREGVACLSSGGDRINYADSVKGRFTISRDIAKNTVYLQMNSLRPEDTALYHCAAGTSTTVRDMCGIIYLYDYWGQGTLVTVSS

SEQ ID NO: 416 - protein, 127 aa, synthetic construct
EVQLVESGGGVVQPGGSLRLSCAASGFTLDYYVIGWFRQAPGKEREGVACLSSGGDRINYADSVKGRFTISRDIAKNTVYLQMNSLRPEDTALYHCAAGTSTTVRDMCGIFYLYDYWGQGTLVTVSS

SEQ ID NO: 417 - protein, 127 aa, synthetic construct
EVQLVESGGGVVQPGGSLRLSCAASGFTLDYYVIGWFRQAPGKEREGVACLSSGGDRINYADSVKGRFTISRDIAKNTVYLQMNSLRPEDTALYHCAAGTSTTVRDMCGILYLYDYWAQGTLVTVSS

SEQ ID NO: 418 - protein, 127 aa, synthetic construct
EVQLVESGGGVVQPGGSLRLSCAASGFTLDYYVIGWFRQAPGKEREGVACLSSGGDRINYADSVKGRFTISRDIAKNTVYLQMNSLRPEDTALYHCAAGTSTTVRDMCGIIYLYDYWAQGTLVTVSS

SEQ ID NO: 419 - protein, 127 aa, synthetic construct
EVQLVESGGGVVQPGGSLRLSCAASGFTLDYYVIGWFRQAPGKEREGVACLSSGGDRINYADSVKGRFTISRDIAKNTVYLQMNSLRPEDTALYHCAAGTSTTVRDMCGIFYLYDYWAQGTLVTVSS

SEQ ID NO: 420 - protein, 127 aa, synthetic construct
EVQLVESGGGVVQPGGSLRLSCAASGFTLDYYVIGWFRQAPGKEREGVACLSSEGDRINYADSVKGRFTISRDIAKNTVYLQMNSLRPEDTALYHCAAGTSTTVRDMCGILYLYDYWGQGTLVTVSS

SEQ ID NO: 421 - protein, 127 aa, synthetic construct
EVQLVESGGGVVQPGGSLRLSCAASGFTLDYYVIGWFRQAPGKEREGVACLSSEGDRINYADSVKGRFTISRDIAKNTVYLQMNSLRPEDTALYHCAAGTSTTVRDMCGIIYLYDYWGQGTLVTVSS

SEQ ID NO: 422 - protein, 127 aa, synthetic construct
EVQLVESGGGVVQPGGSLRLSCAASGFTLDYYVIGWFRQAPGKEREGVACLSSEGDRINYADSVKGRFTISRDIAKNTVYLQMNSLRPEDTALYHCAAGTSTTVRDMCGIFYLYDYWGQGTLVTVSS

SEQ ID NO: 423 - protein, 127 aa, synthetic construct
EVQLVESGGGVVQPGGSLRLSCAASGFTLDYYVIGWFRQAPGKEREGVACLSSEGDRINYADSVKGRFTISRDIAKNTVYLQMNSLRPEDTALYHCAAGTSTTVRDLCGIMYLYDYWGQGTLVTVSS

SEQ ID NO: 424 - protein, 127 aa, synthetic construct
EVQLVESGGGVVQPGGSLRLSCAASGFTLDYYVIGWFRQAPGKEREGVACLSSEGDRINYADSVKGRFTISRDIAKNTVYLQMNSLRPEDTALYHCAAGTSTTVRDECGIMYLYDYWGQGTLVTVSS

SEQ ID NO: 425 - protein, 127 aa, synthetic construct
EVQLVESGGGVVQPGGSLRLSCAASGFTLDYYVIGWFRQAPGKEREGVACLSSGGDRINYADSVKGRFTISRDIAKNTVYLQMNSLRPEDTALYHCAAGTSTTVRDVCGILYLYDYWGQGTLVTVSS

SEQ ID NO: 426 - protein, 127 aa, synthetic construct
EVQLVESGGGVVQPGGSLRLSCAATGFTLDYYVIGWFRQAPGKEREGVACLSSNGDRINYADSVKGRFTISRDIAKNTVYLQMNSLRPEDTALYHCAAGLSTTVRDMCGIMYLYDYWAQGTLVTVSS

SEQ ID NO: 427 - protein, 127 aa, synthetic construct
EVQLVESGGGVVQPGGSLRLSCAATGFTLDYYVIGWFRQAPGKEREGVACLSSNGDRINYADSVKGRFTISRDIAKNTVYLQMNSLRPEDTALYHCAAGTSTTVRDPCGIIYLYDYWAQGTLVTVSS

SEQ ID NO: 428 - protein, 127 aa, synthetic construct
EVQLVESGGGVVQPGGSLRLSCAASGFTLDYYVIGWFRQAPGKEREGVACLSSEGDRINYADSVKGRFTISRDIAKNTVYLQMNSLRPEDTALYHCAAGTSTTVRDICGILYLYDYWAQGTLVTVSS

SEQ ID NO: 429 - protein, 127 aa, synthetic construct
EVQLVESGGGVVQPGGSLRLSCAATGFTLDYYVIGWFRQAPGKEREGVACLSSNGDRINYADSVKGRFTISRDIAKNTVYLQMNSLRPEDTALYHCAAGTSTTVRDMCGIEYLYDYWAQGTLVTVSS

SEQ ID NO: 430 - protein, 127 aa, synthetic construct
EVQLVESGGGVVQPGGSLRLSCAATGFTLDYYVKGWFRQAPGKEREGVACLSSNGDRINYADSVKGRFTISRDIAKNTVYLQMNSLRPEDTALYHCAAGTSTTVRDMCGIMYLYDYWAQGTLVTVSS

SEQ ID NO: 431 - protein, 127 aa, synthetic construct
EVQLVESGGGVVQPGGSLRLSCAATGFTLDYYVTGWFRQAPGKEREGVACLSSNGDRINYADSVKGRFTISRDIAKNTVYLQMNSLRPEDTALYHCAAGTSTTVRDMCGIMYLYDYWAQGTLVTVSS

SEQ ID NO: 432 - protein, 127 aa, synthetic construct
EVQLVESGGGVVQPGGSLRLSCAATGFTLDYYVGGWFRQAPGKEREGVACLSSNGDRINYADSVKGRFTISRDIAKNTVYLQMNSLRPEDTALYHCAAGTSTTVRDMCGIMYLYDYWAQGTLVTVSS

SEQ ID NO: 433 - protein, 127 aa, synthetic construct
EVQLVESGGGVVQPGGSLRLSCAATGFTLDYYVIGWFRQAPGKEREGVACLSSNGDRINYADSVKGRFTISRDIAKNTVYLQMNSLRPEDTALYHCAAGTSTTVRDMCGIPYLYDYWAQGTLVTVSS

SEQ ID NO: 434 - protein, 127 aa, synthetic construct
EVQLVESGGGVVQPGGSLRLSCAATGFTLDYYVIGWFRQAPGKEREGVACLSSNGDRINYADSVKGRFTISRDIAKNTVYLQMNSLRPEDTALYHCAAGTSTTVRDMCGIRYLYDYWAQGTLVTVSS

SEQ ID NO: 435 - protein, 127 aa, synthetic construct
EVQLVESGGGVVQPGGSLRLSCAATGFTLDYYVIGRFRQAPGKEREGVACLSSNGDRINYADSVKGRFTISRDIAKNTVYLQMNSLRPEDTALYHCAAGTSTTVRDMCGIRYLYDYWAQGTLVTVSS

SEQ ID NO: 436 - protein, 127 aa, synthetic construct
EVQLVESGGGVVQPGGSLRLSCAATGFTLDYYVIGWFRQAPGKEREGVACLSSNGDRINYADSVKGRFTISRDIAKNTVYLQMNSLRPEDTALYHCAAGTSTTVRDMCGILYLYDYWAQGTLVTVSS

SEQ ID NO: 437 - protein, 127 aa, synthetic construct
EVQLVESGGGVVQPGGSLRLSCAATGFTLDYYVIGWFRQAPGKEREGVACLSSNGDRINYADSVKGRFTISRDIAKNTVYLQMNSLRPEDTALYHCAAGTSTTVRDMCGIKYLYDYWAQGTLVTVSS

SEQ ID NO: 438 - protein, 127 aa, synthetic construct
EVQLVESGGGVVQPGGSLRLSCAATGFTLDYYVIGWFRQAPGKEREGVACLSSNGDRINYADSVKGRFTISRDIAKNTVYLQMNSLRPEDTALYHCAAGTSTTVRDMCGISYLYDYWAQGTLVTVSS

SEQ ID NO: 439 - protein, 127 aa, synthetic construct
EVQLVESGGGVVQPGGSLRLSCAATGFTLDYYVIGWFRQAPGKEREGVACLSSNGDRINYADSVKGRFTISRDIAKNTVYLQMNSLRPEDTALYHCAAGTSTTVRDMCGIAYLYDYWAQGTLVTVSS

SEQ ID NO: 440 - protein, 127 aa, synthetic construct
EVQLVESGGGVVQPGGSLRLSCAATGFTLDYYVIGWFRQAPGKEREGVACLSSNGDRINYADSVKGRFTISRDIAKNTVYLQMNSLRPEDTALYHCAAGTSTTVRDMCGIDYLYDYWAQGTLVTVSS

SEQ ID NO: 441 - protein, 127 aa, synthetic construct
EVQLVESGGGVVQPGGSLRLSCAATGFTLDYYVIGWFRQAPGKEREGVACLSSNGDRINYADSVKGRFTISRDIAKNTVYLQMNSLRPEDTALYHCAAGTSTTVRDMCGIIYLYDYWAQGTLVTVSS

SEQ ID NO: 442 - protein, 127 aa, synthetic construct
EVQLVESGGGVVQPGGSLRLSCAATGFTLDYYVIGWFRQAPGKEREGVACLSSNGDRINYADSVKGRFTISRDIAKNTVYLQMNSLRPEDTALYHCASGTSTTVRDMCGIMYLYDYWAQGTLVTVSS

SEQ ID NO: 443 - protein, 127 aa, synthetic construct
EVQLVESGGGVVQPGGSLRLSCAASGFTLDYYVLGWFRQAPGKEREGVACLSSYGDRTNYADSVKGRFTISRDIAKNTIYLQINSLRPEDTALYHCAAGTSTTVRDICGIIYLYDYWAQGTLVTVSS

SEQ ID NO: 444 - protein, 127 aa, synthetic construct
EVQLVESGGGVVQPGGSLRLSCAATGFTLDYYVIGWFRQAPGKEREGVACLSSNGDRINYADSVKGRFTISRDIAKNTVYLQMNSLRPEDTALYHCAAGTSTTVRDMCGITYLYDYWAQGTLVTVSS

SEQ ID NO: 445 - protein, 127 aa, synthetic construct
EVQLVESGGGVVQPGGSLRLSCAATGFTLDYYVIGWFRQAPGKEREGVACLSSNGDRINYADSVKGRFTISRDIAKNTVYLQMNSLRPEDTALYHCAAGTSTTVRDMCGIGYLYDYWAQGTLVTVSS

SEQ ID NO: 446 - protein, 127 aa, synthetic construct
EVQLVESGGGVVQPGGSLRLSCAATGFTLDYYVIGWFRQAPGKEREGVACLSSNGDRINYADSVKGRFTISRDIAKNTVYLQMNSLRPEDTALYHCAAGTSTTVRDMCGIHYLYDYWAQGTLVTVSS

SEQ ID NO: 447 - protein, 127 aa, synthetic construct
EVQLGESGGGVVQPGGSLRLSCAATGFTLDYYVIGWFRQAPGKEREGVACLSSNGDRINYADSVKGRFTISRDIAKNTVYLQMNSLRPEDTALYHCAAGTSTTVRDMCGIVYLYDYWAQGTLVTVSS

SEQ ID NO: 448 - protein, 127 aa, synthetic construct
EVQLVESGGGVVQPGGSLRLSCAATGFTLDYYVIGWFRQAPGKEREGVACLSSNGDRINYADSVKGRFTISRDIAKNTVYLQMNSLRPEDTALYHCAAGTSTTVRDMCGIYYLYDYWAQGTLVTVSS

SEQ ID NO: 449 - protein, 127 aa, synthetic construct
EVQLVESGGGVVQPGGSLRLSCAATGFTLDYYVIGWFRQAPGKEREGVACLSSNGDRINYADSVKGRFTISRDIAKNTVYLQMNSLRPEDTALYHCAAGTSTTVRDMCGIVYLYDYWAQGTLVTVSS

SEQ ID NO: 450 - protein, 127 aa, synthetic construct
EVQLVESGGGVVQPGGSLRLSCAATGFTLDYYVIGWFRQAPGKEREGVACLSSNGDRINYADSVKGRFTISRDIAKNTVYLQMNSLRPEDTALYHCAAGTSTTVRDMCGIFYLYDYWAQGTLVTVSS

SEQ ID NO: 451 - protein, 127 aa, synthetic construct
EVQLVESGGGVVQPGGSLRLSCAATGFTLDYYVIGWFRQAPGKEREGVACLSSNGDRINYADSVKGRFTISRDIAKNTVYLQMNSLRPEDTALYHCAAGTSTTVRDYCGIMYLYDYWAQGTLVTVSS

SEQ ID NO: 452 - protein, 127 aa, synthetic construct
EVQLVESGGGVVQPGGSLRLSCAATGFTLDYYVIGWFRQAPGKEREGVACLSSNGDRINYADSVKGRFTISRDIAKNTVYLQMNSLRPEDTALYHCAAGTSTTVRGYCGIMYLYDYWAQGTLVTVSS

SEQ ID NO: 453 - protein, 127 aa, synthetic construct
EVQLVESGGGVVQPGGSLRLSCAATGFTLDYYVIGWFRQAPGKEREGVACLSSNGDRINYADSVKGRFTISRDIAKNTVYLQMNSLRPEDTALYHCAAGTSTTVRDACGIMYLYDYWAQGTLVTVSS

SEQ ID NO: 454 - protein, 127 aa, synthetic construct
EVQLVESGGGVVQPGGSLRLSCAATGFTLDYYVIGWFRQAPGKEREGVACLSSNGDRINYADSVKGRFTISRDIAKNTVYLQMNSLRPEDTALYHCAAGTSTTVRDHCGIMYLYDYWAQGTLVTVSS

SEQ ID NO: 455 - protein, 127 aa, synthetic construct
EVQLVESGGGVVQPGGSLRLSCAATGFTLDYYVIGWFRQAPGKEREGVACLSSNGDRINYADSVKGRFTISRDIAKNTVYLQMNSLRPEDTALYHCAAGTSTTVRDVCGIMYLYDYWAQGTLVTVSS

SEQ ID NO: 456 - protein, 127 aa, synthetic construct
EVQLVESGGGVVQPGGSLRLSCAASGFTLDYYVIGWFRQAPGKEREGVACLSSNGDRTNYADSVKGRFTISRDIAKNTVYLQMNSLRPEDTALYHCAAGTSTTVRDRCGIMYLYDYWAQGTLVTVSS

SEQ ID NO: 457 - protein, 127 aa, synthetic construct
EVQLVESGGGVVQPGGSLRLSCAASGFTLDYYVLGWFRQAPGKEREGVACLSSKGDRTNYADSVKGRFTISRDIAKNTIYLQINSLRPEDTALYHCAAGTSTTVRDICGIIYLYDYWAQGTLVTVSS

SEQ ID NO: 458 - protein, 127 aa, synthetic construct
EVQLVESGGGVVQPGGSLRLSCAATGFTLDYYVIGWFRQAPGKEREGVACLSSNGDRINYADSVKGRFTISRDIAKNTVYLQMNSLRPEDTALYHCAGGTSTTVRDMCGIMYLYDYWAQGTLVTVSS

SEQ ID NO: 459 - protein, 127 aa, synthetic construct
EVQLVESGGGVVQPGGSLRLSCAATGFTLDYYVMGWFRQAPGKEREGVACLSSNGDRINYADSVKGRFTISRDIAKNTVYLQMNSLRPEDTALYHCAAGTSTTVRDMCGIMYLYDYWAQGTLVTVSS

SEQ ID NO: 460 - protein, 127 aa, synthetic construct
EVQLVESGGGVVQPGGSLRLSCAATGFTLDYYVIGWFRQAPGKEREGVACLSSNGDRINYADSVKGRFTISRDIAKNTVYLQMNSLRPEDTALYHCAAGTSTTVRDMCGIQYLYDYWAQGTLVTVSS

SEQ ID NO: 461 - protein, 127 aa, synthetic construct
EVQLVESGGGVVQPGGSLRLSCAATGFTLDYYVFGWFRQAPGKEREGVACLSSNGDRINYADSVKGRFTISRDIAKNTVYLQMNSLRPEDTALYHCAAGTSTTVRDMCGIMYLYDYWAQGTLVTVSS

SEQ ID NO: 462 - protein, 127 aa, synthetic construct
EVQLVESGGGVVQPGGSLRLSCAATGFTLDYYVIGWFRQAPGKEREGVACLSSNGDRINYADSVKGRFTISRDIAKNTVYLQMNSLRPEDTALYHCAAGASTTVRDMCGIMYLYDYWAQGTLVTVSS

SEQ ID NO: 463 - protein, 127 aa, synthetic construct
EVQLVESGGGVVQPGGSLRLSCAATGFTLDYYVIGWFRQAPGKEREGVACLSSNGDRINYADSVKGRFTISRDIAKNTVYLQMNSLRPEDTALYHCAAGHSTTVRDMCGIMYLYDYWAQGTLVTVSS

SEQ ID NO: 464 - protein, 127 aa, synthetic construct
EVQLVESGGGVVQPGGSLRLSCAATGFTLDYYVIGWFRQAPGKEREGVACLSSNGDRINYADSVKGRFTISRDIAKNTVYLQMNSLRPEDTALYHCAAGRSTTVRDMCGIMYLYDYWAQGTLVTVSS

SEQ ID NO: 465 - protein, 127 aa, synthetic construct
EVQLVESGGGVVQPGGSLRLSCAATGFTLDYYVIGWFRQAPGKEREGVACLSSNGDRINYADSVKGRFTISRDIAKNTVYLQMNSLRPEDTALYHCAAGQSTTVRDMCGIMYLYDYWAQGTLVTVSS

SEQ ID NO: 466 - protein, 127 aa, synthetic construct
EVQLVESGGGVVQPGGSLRLSCAATGFTLDYYVIGWFRQAPGKEREGVACLSSNGDRINYADSVKGRFTISRDIAKNTVYLQMNSLRPEDTALYHCAAGPSTTVRDMCGIMYLYDYWAQGTLVTVSS

SEQ ID NO: 467 - protein, 127 aa, synthetic construct
EVQLVESGGGVVQPGGSLRLSCAATGFTLDYYVIGWFRQAPGKEREGVACLSSNGDRINYADSVKGRFTISRDIAKNTVYLQMNSLRPEDTALYHCAAGKSTTVRDMCGIMYLYDYWAQGTLVTVSS

SEQ ID NO: 468 - protein, 127 aa, synthetic construct
EVQLVESGGGVVQPGGSLRLSCAATGFTLDYYVSGWFRQAPGKEREGVACLSSNGDRINYADSVKGRFTISRDIAKNTVYLQMNSLRPEDTALYHCAAGTSTTVRDMCGIMYLYDYWAQGTLVTVSS

SEQ ID NO: 469 - protein, 127 aa, synthetic construct
EVQLVESGGGVVQPGGSLRLSCAATGFTLDYYVEGWFRQAPGKEREGVACLSSNGDRINYADSVKGRFTISRDIAKNTVYLQMNSLRPEDTALYHCAAGTSTTVRDMCGIMYLYDYWAQGTLVTVSS

SEQ ID NO: 470 - protein, 127 aa, synthetic construct
EVQLVESGGGVVQPGGSLRLSCAATGFTLDYYVIGWFRQAPGKEREGVACLSSNGDRINYADSVKGRFTISRDIAKNTVYLQMNSLRPEDTALYHCATGTSTTVRDMCGIMYLYDYWAQGTLVTVSS

SEQ ID NO: 471 - protein, 127 aa, synthetic construct
EVQLVESGGGVVQPGGSLRLSCAATGFTLDYYVIGWFRQAPGKEREGVACLSSNGDRINYADSVKGRFTISRDIAKNTVYLQMNSLRPEDTALYHCAPGTSTTVRDMCGIMYLYDYWAQGTLVTVSS

SEQ ID NO: 472 - protein, 127 aa, synthetic construct
EVQLVESGGGVVQPGGSLRLSCAATGFTLDYYVHGWFRQAPGKEREGVACLSSNGDRINYADSVKGRFTISRDIAKNTVYLQMNSLRPEDTALYHCAAGTSTTVRDMCGIMYLYDYWAQGTLVTVSS

SEQ ID NO: 473 - protein, 127 aa, synthetic construct
EVQLVESGGGVVQPGGSLRLSCAATGFTLDYYVIGWFRQAPGKEREGVACLSSNGDRINYADSVKGRFTISRDIAKNTVYLQMNSLRPEDTALYHCAIGTSTTVRDMCGIMYLYDYWAQGTLVTVSS

SEQ ID NO: 474 - protein, 127 aa, synthetic construct
EVQLVESGGGVVQPGGSLRLSCAATGFTLDYYVDGWFRQAPGKEREGVACLSSNGDRINYADSVKGRFTISRDIAKNTVYLQMNSLRPEDTALYHCAAGTSTTVRDMCGIMYLYDYWAQGTLVTVSS

SEQ ID NO: 475 - protein, 127 aa, synthetic construct
EVQLVESGGGVVQPGGSLRLSCAATGFTLDYYVLGWFRQAPGKEREGVACLSSNGDRINYADSVKGRFTISRDIAKNTVYLQMNSLRPEDTALYHCAAGTSTTVRDMCGIMYLYDYWAQGTLVTVSS

SEQ ID NO: 476 - protein, 127 aa, synthetic construct
EVQLVESGGGVVQPGGSLRLSCAATGFTLDYYVPGWFRQAPGKEREGVACLSSNGDRINYADSVKGRFTISRDIAKNTVYLQMNSLRPEDTALYHCAAGTSTTVRDMCGIMYLYDYWAQGTLVTVSS

SEQ ID NO: 477 - protein, 127 aa, synthetic construct
EVQLVESGGGVVQPGGSLRLSCAATGFTLDYYVIGWFRQAPGKEREGVACLSSNGDRINYADSVKGRFTISRDIAKNTVYLQMNSLRPEDTALYHCAEGTSTTVRDMCGIMYLYDYWAQGTLVTVSS

SEQ ID NO: 478 - protein, 127 aa, synthetic construct
EVQLVESGGGVVQPGGSLRLSCAATGFTLDYYVIGWFRQAPGKEREGVACLSSNGDRINYADSVKGRFTISRDIAKNTVYLQMNSLRPEDTALYHCADGTSTTVRDMCGIMYLYDYWAQGTLVTVSS

SEQ ID NO: 479 - protein, 127 aa, synthetic construct
EVQLVESGGGVVQPGGSLRLSCAATGFTLDYYVIGWFRQAPGKEREGVACLSSNGDRINYADSVKGRFTISRDIAKNTVYLQMNSLRPEDTALYHCAKGTSTTVRDMCGIMYLYDYWAQGTLVTVSS

SEQ ID NO: 480 - protein, 127 aa, synthetic construct
EVQLVESGGGVVQPGGSLRLSCAATGFTLDYYVRGWFRQAPGKEREGVACLSSNGDRINYADSVKGRFTISRDIAKNTVYLQMNSLRPEDTALYHCAAGTSTTVRDMCGIMYLYDYWAQGTLVTVSS

SEQ ID NO: 481 - protein, 127 aa, synthetic construct
EVQLVESGGGVVQPGGSLRLSCAATGFTLDYYVIGWFRQAPGKEREGVACLSSNGDRINYADSVKGRFTISRDIAKNTVYLQMNSLRPEDTALYHCAVGTSTTVRDMCGIMYLYDYWAQGTLVTVSS

SEQ ID NO: 482 - protein, 127 aa, synthetic construct
EVQLVESGGGVVQPGGSLRLSCAATGFTLDYYVIGWFRQAPGKEREGVACLSSNGDRINYADSVKGRFTISRDIAKNTVYLQMNSLRPEDTALYHCAHGTSTTVRDMCGIMYLYDYWAQGTLVTVSS

SEQ ID NO: 483 - protein, 127 aa, synthetic construct
EVQLVESGGGVVQPGGSLRLSCAATGFTLDYYVYGWFRQAPGKEREGVACLSSNGDRINYADSVKGRFTISRDIAKNTVYLQMNSLRPEDTALYHCAAGTSTTVRDMCGIMYLYDYWAQGTLVTVSS

SEQ ID NO: 484 - protein, 127 aa, synthetic construct
EVQLVESGGGVVQPGGSLRLSCAATGFTLDYYVVGWFRQAPGKEREGVACLSSNGDRINYADSVKGRFTISRDIAKNTVYLQMNSLRPEDTALYHCAAGTSTTVRDMCGIMYLYDYWAQGTLVTVSS

SEQ ID NO: 485 - protein, 127 aa, synthetic construct
EVQLVESGGGVVQPGGSLRLSCAATGFTLDYYVQGWFRQAPGKEREGVACLSSNGDRINYADSVKGRFTISRDIAKNTVYLQMNSLRPEDTALYHCAAGTSTTVRDMCGIMYLYDYWAQGTLVTVSS

SEQ ID NO: 486 - protein, 127 aa, synthetic construct
EVQLVESGGGVVQPGGSLRLSCAATGFTLDYYVAGWFRQAPGKEREGVACLSSNGDRINYADSVKGRFTISRDIAKNTVYLQMNSLRPEDTALYHCAAGTSTTVRDMCGIMYLYDYWAQGTLVTVSS

SEQ ID NO: 487 - protein, 127 aa, synthetic construct
EVQLVESGGGVVQPGGSLRLSCAATGFTLDYYVIGWFRQAPGKEREGVACLSSNGDRINYADSVKGRFTISRDIAKNTVYLQMNSLRPEDTALYHCAFGTSTTVRDMCGIMYLYDYWAQGTLVTVSS

SEQ ID NO: 488 - protein, 127 aa, synthetic construct
EVQLVESGGGVVQPGGSLRLSCAASGFTLDYYVLGWFRQAPGKEREGVACLSSTGDRTNYADSVKGRFTISRDIAKNTIYLQINSLRPEDTALYHCAAGTSTTVRDICGIIYLYDYWAQGTLVTVSS

SEQ ID NO: 489 - protein, 25 aa, synthetic construct
DVQLVESGGGVVQPGGSLRLSCAAS

SEQ ID NO: 490 - protein, 25 aa, synthetic construct
EVQLVESGGGVVQPGGSLRLSCAAS

SEQ ID NO: 491 - protein, 25 aa, synthetic construct
EVQLVESGGGVVQPGGSLRLSCAAT

SEQ ID NO: 492 - protein, 25 aa, synthetic construct
EVQLVESGGGLVQSGGSLRLSCAAT

SEQ ID NO: 493 - protein, 10 aa, synthetic construct
GFTLDYYVIG

SEQ ID NO: 494 - protein, 10 aa, synthetic construct
GFTLDYYVLG

SEQ ID NO: 495 - protein, 10 aa, synthetic construct
GFTLDYYVYG

SEQ ID NO: 496 - protein, 10 aa, synthetic construct
GFTLDYYVFG

SEQ ID NO: 497 - protein, 10 aa, synthetic construct
GFTLDDYVIG

SEQ ID NO: 498 - protein, 10 aa, synthetic construct
GFTLDQYVIG

SEQ ID NO: 499 - protein, 10 aa, synthetic construct
GFTLDAYVIG

SEQ ID NO: 500 - protein, 10 aa, synthetic construct
GFTLDPYVIG

SEQ ID NO: 501 - protein, 10 aa, synthetic construct
GFTLDSYVIG

SEQ ID NO: 502 - protein, 10 aa, synthetic construct
GFTLDGYVIG

SEQ ID NO: 503 - protein, 10 aa, synthetic construct
GFTLDTYVIG

SEQ ID NO: 504 - protein, 10 aa, synthetic construct
GFTLDVYVIG

SEQ ID NO: 505 - protein, 10 aa, synthetic construct
GFTLDIYVIG

SEQ ID NO: 506 - protein, 10 aa, synthetic construct
GFTLDRYVIG

SEQ ID NO: 507 - protein, 10 aa, synthetic construct
GFTLDKYVIG

SEQ ID NO: 508 - protein, 10 aa, synthetic construct
GFTLDEYVIG

SEQ ID NO: 509 - protein, 10 aa, synthetic construct
GFTLDLYVIG

SEQ ID NO: 510 - protein, 10 aa, synthetic construct
GFTLDHYFIG

SEQ ID NO: 511 - protein, 10 aa, synthetic construct
GFTLDFYVIG

SEQ ID NO: 512 - protein, 10 aa, synthetic construct
GFTLDYYVTG

SEQ ID NO: 513 - protein, 10 aa, synthetic construct
GFTLDYYVGG

SEQ ID NO: 514 - protein, 10 aa, synthetic construct
GFTLDYYVMG

SEQ ID NO: 515 - protein, 10 aa, synthetic construct
GFTLDYYVSG

SEQ ID NO: 516 - protein, 10 aa, synthetic construct
GFTLDYYVEG

SEQ ID NO: 517 - protein, 10 aa, synthetic construct
GFTLDYYVHG

SEQ ID NO: 518 - protein, 10 aa, synthetic construct
GFTLDYYVDG

SEQ ID NO: 519 - protein, 10 aa, synthetic construct
GFTLDYYVPG

SEQ ID NO: 520 - protein, 10 aa, synthetic construct
GFTLDYYVRG

SEQ ID NO: 521 - protein, 10 aa, synthetic construct
GFTLDYYVVG

SEQ ID NO: 522 - protein, 10 aa, synthetic construct
GFTLDYYVQG

SEQ ID NO: 523 - protein, 10 aa, synthetic construct
GFTLDYYVAG

SEQ ID NO: 524 - protein, 14 aa, synthetic construct
WFRQAPGKEREGVA

SEQ ID NO: 525 - protein, 14 aa, synthetic construct
WFRQAPGKEREGVS

SEQ ID NO: 526 - protein, 10 aa, synthetic construct
CLSSNGDRIN

SEQ ID NO: 527 - protein, 10 aa, synthetic construct
CGSSEGDRIN

SEQ ID NO: 528 - protein, 10 aa, synthetic construct
CHSSEGDRIN

SEQ ID NO: 529 - protein, 10 aa, synthetic construct
CKSSEGDRIN

SEQ ID NO: 530 - protein, 10 aa, synthetic construct
CLSEEGDRIN

SEQ ID NO: 531 - protein, 10 aa, synthetic construct
CLSGEGDRIN

SEQ ID NO: 532 - protein, 10 aa, synthetic construct
CLSHEGDRIN

SEQ ID NO: 533 - skipped

SEQ ID NO: 534 - protein, 10 aa, synthetic construct
CLSPEGDRIN

SEQ ID NO: 535 - protein, 10 aa, synthetic construct
CLSQEGDRIN

SEQ ID NO: 536 - protein, 10 aa, synthetic construct
CLSSAGDRIN

SEQ ID NO: 537 - protein, 10 aa, synthetic construct
CLSSAGDRTN

SEQ ID NO: 538 - protein, 10 aa, synthetic construct
CLSSDGDRIN

SEQ ID NO: 539 - protein, 10 aa, synthetic construct
CLSSEGDRAN

SEQ ID NO: 540 - protein, 10 aa, synthetic construct
CLSSEGDREN

SEQ ID NO: 541 - protein, 10 aa, synthetic construct
CLSSEGDRGN

SEQ ID NO: 542 - protein, 10 aa, synthetic construct
CLSSEGDRHN

SEQ ID NO: 543 - protein, 10 aa, synthetic construct
CLSSEGDRIN

SEQ ID NO: 544 - protein, 10 aa, synthetic construct
CLSSEGDRKN

SEQ ID NO: 545 - skipped

SEQ ID NO: 546 - protein, 10 aa, synthetic construct
CLSSEGDRPN

SEQ ID NO: 547 - protein, 10 aa, synthetic construct
CLSSEGDRRN

SEQ ID NO: 548 - protein, 10 aa, synthetic construct
CLSSEGDRSN

SEQ ID NO: 549 - protein, 10 aa, synthetic construct
CLSSEGDRTN

SEQ ID NO: 550 - protein, 10 aa, synthetic construct
CLSSFGDRTN

SEQ ID NO: 551 - protein, 10 aa, synthetic construct
CLSSGGDRIN

SEQ ID NO: 552 - protein, 10 aa, synthetic construct
CLSSHGDRIN

SEQ ID NO: 553 - protein, 10 aa, synthetic construct
CLSSHGDRTN

SEQ ID NO: 554 - protein, 10 aa, synthetic construct
CLSSIGDRIN

SEQ ID NO: 555 - protein, 10 aa, synthetic construct
CLSSIGDRTN

SEQ ID NO: 556 - protein, 10 aa, synthetic construct
CLSSKGDRIN

SEQ ID NO: 557 - protein, 10 aa, synthetic construct
CLSSKGDRTN

SEQ ID NO: 558 - protein, 10 aa, synthetic construct
CLSSLGDRIN

SEQ ID NO: 559 - protein, 10 aa, synthetic construct
CLSSLGDRTN

SEQ ID NO: 560 - protein, 10 aa, synthetic construct
CLSSNDDRIN

SEQ ID NO: 561 - protein, 10 aa, synthetic construct
CLSSNFDRIN

SEQ ID NO: 562 - protein, 10 aa, synthetic construct
CLSSNGDRIA

SEQ ID NO: 563 - protein, 10 aa, synthetic construct
CLSSNGDRID

SEQ ID NO: 564 - protein, 10 aa, synthetic construct
CLSSNGDRIE

SEQ ID NO: 565 - protein, 10 aa, synthetic construct
CLSSNGDRIF

SEQ ID NO: 566 - protein, 10 aa, synthetic construct
CLSSNGDRIG

SEQ ID NO: 567 - protein, 10 aa, synthetic construct
CLSSNGDRIH

SEQ ID NO: 568 - protein, 10 aa, synthetic construct
CLSSNGDRII

SEQ ID NO: 569 - protein, 10 aa, synthetic construct
CLSSNGDRIK

SEQ ID NO: 570 - protein, 10 aa, synthetic construct
CLSSNGDRIL

SEQ ID NO: 571 - protein, 10 aa, synthetic construct
CLSSNGDRIP

SEQ ID NO: 572 - protein, 10 aa, synthetic construct
CLSSNGDRIQ

SEQ ID NO: 573 - protein, 10 aa, synthetic construct
CLSSNGDRIR

SEQ ID NO: 574 - protein, 10 aa, synthetic construct
CLSSNGDRIS

SEQ ID NO: 575 - protein, 10 aa, synthetic construct
CLSSNGDRIT

SEQ ID NO: 576 - protein, 10 aa, synthetic construct
CLSSNGDRIV

SEQ ID NO: 577 - protein, 10 aa, synthetic construct
CLSSNGDRIY

SEQ ID NO: 578 - protein, 10 aa, synthetic construct
CLSSNGDRTN

SEQ ID NO: 579 - protein, 10 aa, synthetic construct
CLSSNHDRIN

SEQ ID NO: 580 - protein, 10 aa, synthetic construct
CLSSNKDRIN

SEQ ID NO: 581 - protein, 10 aa, synthetic construct
CLSSNLDRIN

SEQ ID NO: 582 - protein, 10 aa, synthetic construct
CLSSNPDRIN

SEQ ID NO: 583 - protein, 10 aa, synthetic construct
CLSSNQDRIN

SEQ ID NO: 584 - protein, 10 aa, synthetic construct
CLSSNRDRIN

SEQ ID NO: 585 - protein, 10 aa, synthetic construct
CLSSNSDRIN

SEQ ID NO: 586 - protein, 10 aa, synthetic construct
CLSSNTDRIN

SEQ ID NO: 587 - protein, 10 aa, synthetic construct
CLSSNVDRIN

SEQ ID NO: 588 - protein, 10 aa, synthetic construct
CLSSNYDRIN

SEQ ID NO: 589 - protein, 10 aa, synthetic construct
CLSSPGDRIN

SEQ ID NO: 590 - protein, 10 aa, synthetic construct
CLSSQGDRIN

SEQ ID NO: 591 - protein, 10 aa, synthetic construct
CLSSQGDRTN

SEQ ID NO: 592 - protein, 10 aa, synthetic construct
CLSSRGDRIN

SEQ ID NO: 593 - protein, 10 aa, synthetic construct
CLSSRGDRTN

SEQ ID NO: 594 - protein, 10 aa, synthetic construct
CLSSSGDRIN

SEQ ID NO: 595 - protein, 10 aa, synthetic construct
CLSSSGDRTN

SEQ ID NO: 596 - protein, 10 aa, synthetic construct
CLSSTGDRTN

SEQ ID NO: 597 - protein, 10 aa, synthetic construct
CLSSVGDRIN

SEQ ID NO: 598 - protein, 10 aa, synthetic construct
CLSSVGDRTN

SEQ ID NO: 599 - protein, 10 aa, synthetic construct
CLSSYGDRIN

SEQ ID NO: 600 - protein, 10 aa, synthetic construct
CLSSYGDRTN

SEQ ID NO: 601 - protein, 10 aa, synthetic construct
CPSSEGDRIN

SEQ ID NO: 602 - protein, 10 aa, synthetic construct
CRSSEGDRIN

SEQ ID NO: 603 - protein, 10 aa, synthetic construct
CSSSEGDRIN

SEQ ID NO: 604 - protein, 10 aa, synthetic construct
CTSSEGDRIN

SEQ ID NO: 605 - protein, 39 aa, synthetic construct
YADSVKGRFTISRDIAKNTIYLQINSLRPEDTALYHCAA

SEQ ID NO: 606 - protein, 39 aa, synthetic construct
YADSVKGRFTISRDIAKNTLYLQINSLRPEDTALYHCAA

SEQ ID NO: 607 - protein, 39 aa, synthetic construct
YADSVKGRFTISRDIAKNTLYLQMNSLRPEDTALYHCAA

SEQ ID NO: 608 - protein, 39 aa, synthetic construct
YADSVKGRFTISRDIAKNTVDLQMNSLRPEDTALYHCAA

SEQ ID NO: 609 - protein, 39 aa, synthetic construct
YADSVKGRFTISRDIAKNTVSLQMNSLRPEDTALYHCAA

SEQ ID NO: 610 - protein, 39 aa, synthetic construct
YADSVKGRFTISRDIAKNTVYLQINSLRPEDTALYHCAA

SEQ ID NO: 611 - protein, 39 aa, synthetic construct
YADSVKGRFTISRDIAKNTVYLQINSLRPEDTALYHCAT

SEQ ID NO: 612 - protein, 39 aa, synthetic construct
YADSVKGRFTISRDIAKNTVYLQMNSLKPEDTAVYHCAA

SEQ ID NO: 613 - protein, 39 aa, synthetic construct
YADSVKGRFTISRDIAKNTVYLQMNSLRPEDTALYACAA

SEQ ID NO: 614 - protein, 39 aa, synthetic construct
YADSVKGRFTISRDIAKNTVYLQMNSLRPEDTALYDCAA

SEQ ID NO: 615 - protein, 39 aa, synthetic construct
YADSVKGRFTISRDIAKNTVYLQMNSLRPEDTALYECAA

SEQ ID NO: 616 - protein, 39 aa, synthetic construct
YADSVKGRFTISRDIAKNTVYLQMNSLRPEDTALYFCAA

SEQ ID NO: 617 - protein, 39 aa, synthetic construct
YADSVKGRFTISRDIAKNTVYLQMNSLRPEDTALYGCAA

SEQ ID NO: 618 - protein, 39 aa, synthetic construct
YADSVKGRFTISRDIAKNTVYLQMNSLRPEDTALYHCAA

SEQ ID NO: 619 - protein, 39 aa, synthetic construct
YADSVKGRFTISRDIAKNTVYLQMNSLRPEDTALYHCAD

SEQ ID NO: 620 - protein, 39 aa, synthetic construct
YADSVKGRFTISRDIAKNTVYLQMNSLRPEDTALYHCAE

SEQ ID NO: 621 - protein, 39 aa, synthetic construct
YADSVKGRFTISRDIAKNTVYLQMNSLRPEDTALYHCAF

SEQ ID NO: 622 - protein, 39 aa, synthetic construct
YADSVKGRFTISRDIAKNTVYLQMNSLRPEDTALYHCAG

SEQ ID NO: 623 - protein, 39 aa, synthetic construct
YADSVKGRFTISRDIAKNTVYLQMNSLRPEDTALYHCAH

SEQ ID NO: 624 - protein, 39 aa, synthetic construct
YADSVKGRFTISRDIAKNTVYLQMNSLRPEDTALYHCAI

SEQ ID NO: 625 - protein, 39 aa, synthetic construct
YADSVKGRFTISRDIAKNTVYLQMNSLRPEDTALYHCAK

SEQ ID NO: 626 - protein, 39 aa, synthetic construct
YADSVKGRFTISRDIAKNTVYLQMNSLRPEDTALYHCAP

SEQ ID NO: 627 - protein, 39 aa, synthetic construct
YADSVKGRFTISRDIAKNTVYLQMNSLRPEDTALYHCAQ

SEQ ID NO: 628 - protein, 39 aa, synthetic construct
YADSVKGRFTISRDIAKNTVYLQMNSLRPEDTALYHCAS

SEQ ID NO: 629 - protein, 39 aa, synthetic construct
YADSVKGRFTISRDIAKNTVYLQMNSLRPEDTALYHCAT

SEQ ID NO: 630 - protein, 39 aa, synthetic construct
YADSVKGRFTISRDIAKNTVYLQMNSLRPEDTALYHCAV

SEQ ID NO: 631 - protein, 39 aa, synthetic construct
YADSVKGRFTISRDIAKNTVYLQMNSLRPEDTALYHCAY

SEQ ID NO: 632 - protein, 39 aa, synthetic construct
YADSVKGRFTISRDIAKNTVYLQMNSLRPEDTALYICAA

SEQ ID NO: 633 - protein, 39 aa, synthetic construct
YADSVKGRFTISRDIAKNTVYLQMNSLRPEDTALYKCAA

SEQ ID NO: 634 - protein, 39 aa, synthetic construct
YADSVKGRFTISRDIAKNTVYLQMNSLRPEDTALYLCAA

SEQ ID NO: 635 - protein, 39 aa, synthetic construct
YADSVKGRFTISRDIAKNTVYLQMNSLRPEDTALYPCAA

SEQ ID NO: 636 - protein, 39 aa, synthetic construct
YADSVKGRFTISRDIAKNTVYLQMNSLRPEDTALYQCAA

SEQ ID NO: 637 - protein, 39 aa, synthetic construct
YADSVKGRFTISRDIAKNTVYLQMNSLRPEDTALYRCAA

SEQ ID NO: 638 - protein, 39 aa, synthetic construct
YADSVKGRFTISRDIAKNTVYLQMNSLRPEDTALYTCAA

SEQ ID NO: 639 - protein, 39 aa, synthetic construct
YADSVKGRFTISRDIAKNTVYLQMNSLRPEDTALYVCAA

SEQ ID NO: 640 - protein, 39 aa, synthetic construct
YADSVKGRFTISRDIAKNTVYLQMNSLRPEDTALYYCAA

SEQ ID NO: 641 - protein, 39 aa, synthetic construct
YADSVKGRFTISRDNAKNTVYLQMNSLRPEDTALYHCAA

SEQ ID NO: 642 - protein, 39 aa, synthetic construct
YADSVKGRFTISRDNAKNTVYLQMNSLRPEDTALYYCAA

SEQ ID NO: 643 - protein, 39 aa, synthetic construct
YGDSVKGRFTISRDIAKNTVDLQMNSLRPEDTALYHCAA

SEQ ID NO: 644 - protein, 18 aa, synthetic construct
ATSTTVRDICGIIYVYDY

SEQ ID NO: 645 - protein, 18 aa, synthetic construct
ATSTTVRDLCGIIYLYDY

SEQ ID NO: 646 - protein, 18 aa, synthetic construct
GASTTVRDMCGIMYLYDY

SEQ ID NO: 647 - protein, 18 aa, synthetic construct
GDSTTVRDMCGIMYLYDY

SEQ ID NO: 648 - protein, 18 aa, synthetic construct
GESTTVRDMCGIMYLYDY

SEQ ID NO: 649 - protein, 18 aa, synthetic construct
GFSTTVRDMCGIMYLYDY

SEQ ID NO: 650 - protein, 18 aa, synthetic construct
GGSTTVRDICGIMYLYDY

SEQ ID NO: 651 - protein, 18 aa, synthetic construct
GGSTTVRDMCGIMYLYDY

SEQ ID NO: 652 - protein, 18 aa, synthetic construct
GHSTTVRDMCGIMYLYDY

SEQ ID NO: 653 - protein, 18 aa, synthetic construct
GISTTVRDMCGIMYLYDY

SEQ ID NO: 654 - protein, 18 aa, synthetic construct
GKSTTVRDMCGIMYLYDY

SEQ ID NO: 655 - protein, 18 aa, synthetic construct
GLSTTVRDMCGIMYLYDY

SEQ ID NO: 656 - protein, 18 aa, synthetic construct
GPSTTVRDMCGIMYLYDY

SEQ ID NO: 657 - protein, 18 aa, synthetic construct
GPSTTVRDVCGIMYLYDY

SEQ ID NO: 658 - protein, 18 aa, synthetic construct
GQSTTVRDMCGIMYLYDY

SEQ ID NO: 659 - protein, 18 aa, synthetic construct
GRSTTVRDMCGIMYLYDY

SEQ ID NO: 660 - protein, 18 aa, synthetic construct
GSSTTVRDMCGIMYLYDY

SEQ ID NO: 661 - protein, 18 aa, synthetic construct
GTSTIVRDMCGIMYLYDY

SEQ ID NO: 662 - protein, 18 aa, synthetic construct
GTSTTVRDACGIMYLYDY

SEQ ID NO: 663 - protein, 18 aa, synthetic construct
GTSTTVRDDCGIMYLYDY

SEQ ID NO: 664 - protein, 18 aa, synthetic construct
GTSTTVRDECGIFYLYDY

SEQ ID NO: 665 - protein, 18 aa, synthetic construct
GTSTTVRDECGIMYLYDY

SEQ ID NO: 666 - protein, 18 aa, synthetic construct
GTSTTVRDFCGIMYLYDY

SEQ ID NO: 667 - protein, 18 aa, synthetic construct
GTSTTVRDGCGIMYLYDY

SEQ ID NO: 668 - protein, 18 aa, synthetic construct
GTSTTVRDHCGIMYLYDY

SEQ ID NO: 669 - protein, 18 aa, synthetic construct
GTSTTVRDICGIFYLYDY

SEQ ID NO: 670 - protein, 18 aa, synthetic construct
GTSTTVRDICGIIYLYDY

SEQ ID NO: 671 - protein, 18 aa, synthetic construct
GTSTTVRDICGILYLYDY

SEQ ID NO: 672 - protein, 18 aa, synthetic construct
GTSTTVRDICGIMYLYDY

SEQ ID NO: 673 - protein, 18 aa, synthetic construct
GTSTTVRDKCGIMYLYDY

SEQ ID NO: 674 - protein, 18 aa, synthetic construct
GTSTTVRDLCFIMYLYDY

SEQ ID NO: 675 - protein, 18 aa, synthetic construct
GTSTTVRDLCGILYLYDY

SEQ ID NO: 676 - protein, 18 aa, synthetic construct
GTSTTVRDLCGIMYLYDE

SEQ ID NO: 677 - protein, 18 aa, synthetic construct
GTSTTVRDLCGIMYLYDI

SEQ ID NO: 678 - protein, 18 aa, synthetic construct
GTSTTVRDLCGIMYLYDL

SEQ ID NO: 679 - protein, 18 aa, synthetic construct
GTSTTVRDLCGIMYLYDV

SEQ ID NO: 680 - protein, 18 aa, synthetic construct
GTSTTVRDLCGIMYLYDY

SEQ ID NO: 681 - protein, 18 aa, synthetic construct
GTSTTVRDMCGIAYLYDY

SEQ ID NO: 682 - protein, 18 aa, synthetic construct
GTSTTVRDMCGIDYLYDY

SEQ ID NO: 683 - protein, 18 aa, synthetic construct
GTSTTVRDMCGIEYLYDY

SEQ ID NO: 684 - protein, 18 aa, synthetic construct
GTSTTVRDMCGIFYLYDY

SEQ ID NO: 685 - protein, 18 aa, synthetic construct
GTSTTVRDMCGIGYLYDY

SEQ ID NO: 686 - protein, 18 aa, synthetic construct
GTSTTVRDMCGIHYLYDY

SEQ ID NO: 687 - protein, 18 aa, synthetic construct
GTSTTVRDMCGIIYLYDY

SEQ ID NO: 688 - protein, 18 aa, synthetic construct
GTSTTVRDMCGIKYLYDY

SEQ ID NO: 689 - protein, 18 aa, synthetic construct
GTSTTVRDMCGILYLYDY

SEQ ID NO: 690 - protein, 18 aa, synthetic construct
GTSTTVRDMCGIMYFYDY

SEQ ID NO: 691 - protein, 18 aa, synthetic construct
GTSTTVRDMCGIMYLYDY

SEQ ID NO: 692 - protein, 18 aa, synthetic construct
GTSTTVRDMCGIPYLYDY

SEQ ID NO: 693 - protein, 18 aa, synthetic construct
GTSTTVRDMCGIQYLYDY

SEQ ID NO: 694 - protein, 18 aa, synthetic construct
GTSTTVRDMCGIRYLYDY

SEQ ID NO: 695 - protein, 18 aa, synthetic construct
GTSTTVRDMCGISYLYDY

SEQ ID NO: 696 - protein, 18 aa, synthetic construct
GTSTTVRDMCGITYLYDY

SEQ ID NO: 697 - protein, 18 aa, synthetic construct
GTSTTVRDMCGIVYLYDY

SEQ ID NO: 698 - protein, 18 aa, synthetic construct
GTSTTVRDMCGIYYLYDY

SEQ ID NO: 699 - protein, 18 aa, synthetic construct
GTSTTVRDPCGIIYLYDY

SEQ ID NO: 700 - protein, 18 aa, synthetic construct
GTSTTVRDPCGIMYLYDY

SEQ ID NO: 701 - protein, 18 aa, synthetic construct
GTSTTVRDRCGIMYLYDY

SEQ ID NO: 702 - protein, 18 aa, synthetic construct
GTSTTVRDSCGIMYLYDY

SEQ ID NO: 703 - protein, 18 aa, synthetic construct
GTSTTVRDTCGIMYLYDY

SEQ ID NO: 704 - protein, 18 aa, synthetic construct
GTSTTVRDVCGIFYLYDY

SEQ ID NO: 705 - protein, 18 aa, synthetic construct
GTSTTVRDVCGIIYLYDY

SEQ ID NO: 706 - protein, 18 aa, synthetic construct
GTSTTVRDVCGILYLYDY

SEQ ID NO: 707 - protein, 18 aa, synthetic construct
GTSTTVRDVCGIMYLYDY

SEQ ID NO: 708 - protein, 18 aa, synthetic construct
GTSTTVRDYCGIMYLYDY

SEQ ID NO: 709 - protein, 18 aa, synthetic construct
GTSTTVRGYCGIMYLYDY

SEQ ID NO: 710 - protein, 18 aa, synthetic construct
GVSTTVRDMCGIMYLYDY

SEQ ID NO: 711 - protein, 18 aa, synthetic construct
GYSTTVRDMCGIMYLYDY

SEQ ID NO: 712 - protein, 11 aa, synthetic construct
WAQGTLVTVSS

SEQ ID NO: 713 - protein, 11 aa, synthetic construct
WGQGTLVTVSS

SEQ ID NO: 714 - protein, 126 aa, synthetic construct
DVQLVESGGGVVQPGGSLRLSCAAPGDTFSENDIGWFRQTPGKEREFVAAIVWPGGETYYRDSVKGRFTLSRDNAKNTVYLQMNSLRPEDTALYSCAVKIFSKTGTYSASWEYDFWGQGTLVTVSS

SEQ ID NO: 715 - protein, 126 aa, synthetic construct
EVQLVESGGGVVQPGGSLRLSCAAPGDTFSENDIGWFRQAPGKEREFVAAIVWPGAETGYRDAVKGRFTLSRDNAKNTVYLQMNSLRPEDTALYYCAQKIFSKTGTYSASWEYDFWGQGTLVTVSS

SEQ ID NO: 716 - protein, 126 aa, synthetic construct
EVQLVESGGGVVQPGGSLRLSCAAPGDTFSENDIGWFRQAPGKEREFVAAIKWPGGETGYKDKVKGRFTLSRDNAKNTVYLQMNSLRPEDTALYYCAQKIFSKTGTYSASWEYDFWGQGTLVTVSS

SEQ ID NO: 717 - protein, 126 aa, synthetic construct
EVQLVESGGGVVQPGGSLRLSCAAPGDTFSQNDIGWFRQAPGKEREFVAAIVWPGGETGYKDKVKGRFTLSRDNAKNTVYLQMNSLRPEDTALYYCAQKIFSKTGTYSASWEYDFWGQGTLVTVSS

SEQ ID NO: 718 - protein, 126 aa, synthetic construct
EVQLVESGGGVVQPGGSLRLSCAAPGDTFSENDIGWFRQAPGKEREFVAAIVWPGGETGYKDKVKGRFTLSRDNAKNTVYLQMNSLRPEDTALYYCAQKIFSKTGTYSASWEYDFWGQGTLVTVSS

SEQ ID NO: 719 - protein, 126 aa, synthetic construct
EVQLVESGGGVVQPGGSLRLSCAAPGDTFSQNDIGWFRQAPGKEREFVAAIKWPGAETYYKDKVKGRFTLSRDNAKNTVYLQMNSLRPEDTALYYCAQKIFSKTGTYSASWEYDFWGQGTLVTVSS

SEQ ID NO: 720 - protein, 126 aa, synthetic construct
EVQLVESGGGVVQPGGSLRLSCAAPGDTFSENDIGWFRQAPGKEREFVAAIKWPGAETYYKDKVKGRFTLSRDNAKNTVYLQMNSLRPEDTALYYCAQKIFSKTGTYSASWEYDFWGQGTLVTVSS

SEQ ID NO: 721 - protein, 126 aa, synthetic construct
EVQLVESGGGVVQPGGSLRLSCAAPGDTFSQNDIGWFRQAPGKEREFVAAIKWPGAETYYRDAVKGRFTLSRDNAKNTVYLQMNSLRPEDTALYYCAVKIFSKTGTYSASWEYDFWGQGTLVTVSS

SEQ ID NO: 722 - protein, 126 aa, synthetic construct
EVQLVESGGGVVQPGGSLRLSCAAPGDTFSQNDIGWFRQAPGKEREFVAAIVWPGAETYYKDKVKGRFTLSRDNAKNTVYLQMNSLRPEDTALYYCAQKIFSKTGTYSASWEYDFWGQGTLVTVSS

SEQ ID NO: 723 - protein, 126 aa, synthetic construct
EVQLVESGGGVVQPGGSLRLSCAAPGDTFSQNDIGWFRQAPGKEREFVAAIKWPGGETYYKDKVKGRFTLSRDNAKNTVYLQMNSLRPEDTALYYCAQKIFSKTGTYSASWEYDFWGQGTLVTVSS

SEQ ID NO: 724 - protein, 126 aa, synthetic construct
EVQLVESGGGVVQPGGSLRLSCAAPGDTFSENDIGWFRQAPGKEREFVAAIKWPGGETYYKDKVKGRFTLSRDNAKNTVYLQMNSLRPEDTALYYCAQKIFSKTGTYSASWEYDFWGQGTLVTVSS

SEQ ID NO: 725 - protein, 126 aa, synthetic construct
EVQLVESGGGVVQPGGSLRLSCAAPGDTFSQNDIGWFRQAPGKEREFVAAIVWPGGETYYKDKVKGRFTLSRDNAKNTVYLQMNSLRPEDTALYYCAQKIFSKTGTYSASWEYDFWGQGTLVTVSS

SEQ ID NO: 726 - protein, 126 aa, synthetic construct
EVQLVESGGGVVQPGGSLRLSCAAPGDTFSENDIGWFRQAPGKEREFVAAIVWPGGETYYKDKVKGRFTLSRDNAKNTVYLQMNSLRPEDTALYYCAQKIFSKTGTYSASWEYDFWGQGTLVTVSS

SEQ ID NO: 727 - protein, 126 aa, synthetic construct
EVQLVESGGGVVQPGGSLRLSCAAPGDTFSQNDIGWFRQAPGKEREFVAAIKWPGAETGYRDKVKGRFTLSRDNAKNTVYLQMNSLRPEDTALYYCAQKIFSKTGTYSASWEYDFWGQGTLVTVSS

SEQ ID NO: 728 - protein, 126 aa, synthetic construct
EVQLVESGGGVVQPGGSLRLSCAAPGDTFSENDIGWFRQAPGKEREFVAAIKWPGAETGYRDKVKGRFTLSRDNAKNTVYLQMNSLRPEDTALYYCAQKIFSKTGTYSASWEYDFWGQGTLVTVSS

SEQ ID NO: 729 - protein, 126 aa, synthetic construct
EVQLVESGGGVVQPGGSLRLSCAAPGDTFSENDIGWFRQAPGKEREFVAAIVWPGAETYYKDKVKGRFTLSRDNAKNTVYLQMNSLRPEDTALYYCAQKIFSKTGTYSASWEYDFWGQGTLVTVSS

SEQ ID NO: 730 - protein, 126 aa, synthetic construct
EVQLVESGGGVVQPGGSLRLSCAAPGDTFSQNDIGWFRQAPGKEREFVAAIVWPGAETGYRDKVKGRFTLSRDNAKNTVYLQMNSLRPEDTALYYCAQKIFSKTGTYSASWEYDFWGQGTLVTVSS

SEQ ID NO: 731 - protein, 126 aa, synthetic construct
EVQLVESGGGVVQPGGSLRLSCAAPGDTFSENDIGWFRQAPGKEREFVAAIVWPGAETGYRDKVKGRFTLSRDNAKNTVYLQMNSLRPEDTALYYCAQKIFSKTGTYSASWEYDFWGQGTLVTVSS

SEQ ID NO: 732 - protein, 126 aa, synthetic construct
EVQLVESGGGVVQPGGSLRLSCAAPGDTFSQNDIGWFRQAPGKEREFVAAIKWPGAETGYKDKVKGRFTLSRDNAKNTVYLQMNSLRPEDTALYYCAQKIFSKTGTYSASWEYDFWGQGTLVTVSS

SEQ ID NO: 733 - protein, 126 aa, synthetic construct
EVQLVESGGGVVQPGGSLRLSCAAPGDTFSQNDIGWFRQAPGKEREFVAAIVWPGAETGYKDKVKGRFTLSRDNAKNTVYLQMNSLRPEDTALYYCAQKIFSKTGTYSASWEYDFWGQGTLVTVSS

SEQ ID NO: 734 - protein, 126 aa, synthetic construct
EVQLVESGGGVVQPGGSLRLSCAAPGDTFSENDIGWFRQAPGKEREFVAAIVWPGAETGYKDKVKGRFTLSRDNAKNTVYLQMNSLRPEDTALYYCAQKIFSKTGTYSASWEYDFWGQGTLVTVSS

SEQ ID NO: 735 - protein, 126 aa, synthetic construct
EVQLVESGGGVVQPGGSLRLSCAAPGDTFSQNDIGWFRQAPGKEREFVAAIKWPGGETGYRDAVKGRFTLSRDNAKNTVYLQMNSLRPEDTALYYCAQKIFSKTGTYSASWEYDFWGQGTLVTVSS

SEQ ID NO: 736 - protein, 126 aa, synthetic construct
EVQLVESGGGVVQPGGSLRLSCAAPGDTFSENDIGWFRQAPGKEREFVAAIKWPGGETGYRDAVKGRFTLSRDNAKNTVYLQMNSLRPEDTALYYCAQKIFSKTGTYSASWEYDFWGQGTLVTVSS

SEQ ID NO: 737 - protein, 126 aa, synthetic construct
EVQLVESGGGVVQPGGSLRLSCAAPGDTFSQNDIGWFRQAPGKEREFVAAIVWPGGETGYRDAVKGRFTLSRDNAKNTVYLQMNSLRPEDTALYYCAQKIFSKTGTYSASWEYDFWGQGTLVTVSS

SEQ ID NO: 738 - protein, 126 aa, synthetic construct
EVQLVESGGGVVQPGGSLRLSCAAPGDTFSENDIGWFRQAPGKEREFVAAIVWPGGETGYRDAVKGRFTLSRDNAKNTVYLQMNSLRPEDTALYYCAQKIFSKTGTYSASWEYDFWGQGTLVTVSS

SEQ ID NO: 739 - protein, 126 aa, synthetic construct
EVQLVESGGGVVQPGGSLRLSCAAPGDTFSENDIGWFRQAPGKEREFVAAIKWPGAETGYKDKVKGRFTLSRDNAKNTVYLQMNSLRPEDTALYYCAQKIFSKTGTYSASWEYDFWGQGTLVTVSS

SEQ ID NO: 740 - protein, 126 aa, synthetic construct
EVQLVESGGGVVQPGGSLRLSCAAPGDTFSQNDIGWFRQAPGKEREFVAAIKWPGAETYYRDAVKGRFTLSRDNAKNTVYLQMNSLRPEDTALYYCAQKIFSKTGTYSASWEYDFWGQGTLVTVSS

SEQ ID NO: 741 - protein, 126 aa, synthetic construct
EVQLVESGGGVVQPGGSLRLSCAAPGDTFSQNDIGWFRQAPGKEREFVAAIKWPGGETGYRDKVKGRFTLSRDNAKNTVYLQMNSLRPEDTALYYCAQKIFSKTGTYSASWEYDFWGQGTLVTVSS

SEQ ID NO: 742 - protein, 126 aa, synthetic construct
EVQLVESGGGVVQPGGSLRLSCAAPGDTFSQNDIGWFRQAPGKEREFVAAIKWPGGETGYKDKVKGRFTLSRDNAKNTVYLQMNSLRPEDTALYYCAQKIFSKTGTYSASWEYDFWGQGTLVTVSS

SEQ ID NO: 743 - protein, 126 aa, synthetic construct
EVQLVESGGGVVQPGGSLRLSCAAPGDTFSQNDIGWFRQAPGKEREFVAAIKWPGGETYYRDAVKGRFTLSRDNAKNTVYLQMNSLRPEDTALYYCAQKIFSKTGTYSASWEYDFWGQGTLVTVSS

SEQ ID NO: 744 - protein, 126 aa, synthetic construct
EVQLVESGGGVVQPGGSLRLSCAAPGDTFSENDIGWFRQAPGKEREFVAAIKWPGGETYYRDAVKGRFTLSRDNAKNTVYLQMNSLRPEDTALYYCAQKIFSKTGTYSASWEYDFWGQGTLVTVSS

SEQ ID NO: 745 - protein, 126 aa, synthetic construct
EVQLVESGGGVVQPGGSLRLSCAAPGDTFSQNDIGWFRQAPGKEREFVAAIVWPGGETYYRDAVKGRFTLSRDNAKNTVYLQMNSLRPEDTALYYCAQKIFSKTGTYSASWEYDFWGQGTLVTVSS

SEQ ID NO: 746 - protein, 126 aa, synthetic construct
EVQLVESGGGVVQPGGSLRLSCAAPGDTFSENDIGWFRQAPGKEREFVAAIVWPGGETYYRDAVKGRFTLSRDNAKNTVYLQMNSLRPEDTALYYCAQKIFSKTGTYSASWEYDFWGQGTLVTVSS

SEQ ID NO: 747 - protein, 126 aa, synthetic construct
EVQLVESGGGVVQPGGSLRLSCAAPGDTFSENDIGWFRQAPGKEREFVAAIKWPGAETYYRDAVKGRFTLSRDNAKNTVYLQMNSLRPEDTALYYCAQKIFSKTGTYSASWEYDFWGQGTLVTVSS

SEQ ID NO: 748 - protein, 126 aa, synthetic construct
EVQLVESGGGVVQPGGSLRLSCAAPGDTFSENDIGWFRQAPGKEREFVAAIVWPGGETGYRDAVKGRFTLSRDNAKNTVYLQMNSLRPEDTALYYCAVKIFSKTGTYSASWEYDFWGQGTLVTVSS

SEQ ID NO: 749 - protein, 126 aa, synthetic construct
EVQLVESGGGVVQPGGSLRLSCAAPGDTFSQNDIGWFRQAPGKEREFVAAIVWPGAETYYRDAVKGRFTLSRDNAKNTVYLQMNSLRPEDTALYYCAQKIFSKTGTYSASWEYDFWGQGTLVTVSS

SEQ ID NO: 750 - protein, 126 aa, synthetic construct
EVQLVESGGGVVQPGGSLRLSCAAPGDTFSQNDIGWFRQAPGKEREFVAAIVWPGGETYYRDKVKGRFTLSRDNAKNTVYLQMNSLRPEDTALYYCAQKIFSKTGTYSASWEYDFWGQGTLVTVSS

SEQ ID NO: 751 - protein, 126 aa, synthetic construct
EVQLVESGGGVVQPGGSLRLSCAAPGDTFSENDIGWFRQAPGKEREFVAAIVWPGGETGYRDKVKGRFTLSRDNAKNTVYLQMNSLRPEDTALYYCAQKIFSKTGTYSASWEYDFWGQGTLVTVSS

SEQ ID NO: 752 - protein, 126 aa, synthetic construct
EVQLVESGGGVVQPGGSLRLSCAAPGDTFSENDIGWFRQAPGKEREFVAAIKWPGAETYYKDAVKGRFTLSRDNAKNTVYLQMNSLRPEDTALYYCAVKIFSKTGTYSASWEYDFWGQGTLVTVSS

SEQ ID NO: 753 - protein, 126 aa, synthetic construct
EVQLVESGGGVVQPGGSLRLSCAAPGDTFSQNDIGWFRQAPGKEREFVAAIVWPGAETYYKDAVKGRFTLSRDNAKNTVYLQMNSLRPEDTALYYCAVKIFSKTGTYSASWEYDFWGQGTLVTVSS

SEQ ID NO: 754 - protein, 126 aa, synthetic construct
EVQLVESGGGVVQPGGSLRLSCAAPGDTFSENDIGWFRQAPGKEREFVAAIVWPGAETYYKDAVKGRFTLSRDNAKNTVYLQMNSLRPEDTALYYCAVKIFSKTGTYSASWEYDFWGQGTLVTVSS

SEQ ID NO: 755 - protein, 126 aa, synthetic construct
EVQLVESGGGVVQPGGSLRLSCAAPGDTFSQNDIGWFRQAPGKEREFVAAIKWPGGETYYKDAVKGRFTLSRDNAKNTVYLQMNSLRPEDTALYYCAVKIFSKTGTYSASWEYDFWGQGTLVTVSS

SEQ ID NO: 756 - protein, 126 aa, synthetic construct
EVQLVESGGGVVQPGGSLRLSCAAPGDTFSENDIGWFRQAPGKEREFVAAIKWPGGETYYKDAVKGRFTLSRDNAKNTVYLQMNSLRPEDTALYYCAVKIFSKTGTYSASWEYDFWGQGTLVTVSS

SEQ ID NO: 757 - protein, 126 aa, synthetic construct
EVQLVESGGGVVQPGGSLRLSCAAPGDTFSENDIGWFRQAPGKEREFVAAIVWPGGETYYRDKVKGRFTLSRDNAKNTVYLQMNSLRPEDTALYYCAQKIFSKTGTYSASWEYDFWGQGTLVTVSS

SEQ ID NO: 758 - protein, 126 aa, synthetic construct
EVQLVESGGGVVQPGGSLRLSCAAPGDTFSQNDIGWFRQAPGKEREFVAAIVWPGGETYYKDAVKGRFTLSRDNAKNTVYLQMNSLRPEDTALYYCAVKIFSKTGTYSASWEYDFWGQGTLVTVSS

SEQ ID NO: 759 - protein, 126 aa, synthetic construct
EVQLVESGGGVVQPGGSLRLSCAAPGDTFSQNDIGWFRQAPGKEREFVAAIKWPGAETGYRDAVKGRFTLSRDNAKNTVYLQMNSLRPEDTALYYCAVKIFSKTGTYSASWEYDFWGQGTLVTVSS

SEQ ID NO: 760 - protein, 126 aa, synthetic construct
EVQLVESGGGVVQPGGSLRLSCAAPGDTFSENDIGWFRQAPGKEREFVAAIKWPGAETGYRDAVKGRFTLSRDNAKNTVYLQMNSLRPEDTALYYCAVKIFSKTGTYSASWEYDFWGQGTLVTVSS

SEQ ID NO: 761 - protein, 126 aa, synthetic construct
EVQLVESGGGVVQPGGSLRLSCAAPGDTFSQNDIGWFRQAPGKEREFVAAIVWPGAETGYRDAVKGRFTLSRDNAKNTVYLQMNSLRPEDTALYYCAVKIFSKTGTYSASWEYDFWGQGTLVTVSS

SEQ ID NO: 762 - protein, 126 aa, synthetic construct
EVQLVESGGGVVQPGGSLRLSCAAPGDTFSENDIGWFRQAPGKEREFVAAIVWPGAETGYRDAVKGRFTLSRDNAKNTVYLQMNSLRPEDTALYYCAVKIFSKTGTYSASWEYDFWGQGTLVTVSS

SEQ ID NO: 763 - protein, 126 aa, synthetic construct
EVQLVESGGGVVQPGGSLRLSCAAPGDTFSQNDIGWFRQAPGKEREFVAAIKWPGGETGYRDAVKGRFTLSRDNAKNTVYLQMNSLRPEDTALYYCAVKIFSKTGTYSASWEYDFWGQGTLVTVSS

SEQ ID NO: 764 - protein, 126 aa, synthetic construct
EVQLVESGGGVVQPGGSLRLSCAAPGDTFSENDIGWFRQAPGKEREFVAAIKWPGGETGYRDAVKGRFTLSRDNAKNTVYLQMNSLRPEDTALYYCAVKIFSKTGTYSASWEYDFWGQGTLVTVSS

SEQ ID NO: 765 - protein, 126 aa, synthetic construct
EVQLVESGGGVVQPGGSLRLSCAAPGDTFSENDIGWFRQAPGKEREFVAAIVWPGGETYYKDAVKGRFTLSRDNAKNTVYLQMNSLRPEDTALYYCAVKIFSKTGTYSASWEYDFWGQGTLVTVSS

SEQ ID NO: 766 - protein, 126 aa, synthetic construct
EVQLVESGGGVVQPGGSLRLSCAAPGDTFSENDIGWFRQAPGKEREFVAAIVWPGAETYYRDAVKGRFTLSRDNAKNTVYLQMNSLRPEDTALYYCAQKIFSKTGTYSASWEYDFWGQGTLVTVSS

SEQ ID NO: 767 - protein, 126 aa, synthetic construct
EVQLVESGGGVVQPGGSLRLSCAAPGDTFSENDIGWFRQAPGKEREFVAAIKWPGGETGYRDKVKGRFTLSRDNAKNTVYLQMNSLRPEDTALYYCAQKIFSKTGTYSASWEYDFWGQGTLVTVSS

SEQ ID NO: 768 - protein, 126 aa, synthetic construct
EVQLVESGGGVVQPGGSLRLSCAAPGDTFSQNDIGWFRQAPGKEREFVAAIKWPGGETGYKDAVKGRFTLSRDNAKNTVYLQMNSLRPEDTALYYCAVKIFSKTGTYSASWEYDFWGQGTLVTVSS

SEQ ID NO: 769 - protein, 126 aa, synthetic construct
EVQLVESGGGVVQPGGSLRLSCAAPGDTFSQNDIGWFRQAPGKEREFVAAIVWPGGETGYKDAVKGRFTLSRDNAKNTVYLQMNSLRPEDTALYYCAVKIFSKTGTYSASWEYDFWGQGTLVTVSS

SEQ ID NO: 770 - protein, 126 aa, synthetic construct
EVQLVESGGGVVQPGGSLRLSCAAPGDTFSENDIGWFRQAPGKEREFVAAIVWPGGETGYKDAVKGRFTLSRDNAKNTVYLQMNSLRPEDTALYYCAVKIFSKTGTYSASWEYDFWGQGTLVTVSS

SEQ ID NO: 771 - protein, 126 aa, synthetic construct
EVQLVESGGGVVQPGGSLRLSCAAPGDTFSQNDIGWFRQAPGKEREFVAAIKWPGAETYYRDKVKGRFTLSRDNAKNTVYLQMNSLRPEDTALYYCAQKIFSKTGTYSASWEYDFWGQGTLVTVSS

SEQ ID NO: 772 - protein, 126 aa, synthetic construct
EVQLVESGGGVVQPGGSLRLSCAAPGDTFSENDIGWFRQAPGKEREFVAAIKWPGAETYYRDKVKGRFTLSRDNAKNTVYLQMNSLRPEDTALYYCAQKIFSKTGTYSASWEYDFWGQGTLVTVSS

SEQ ID NO: 773 - protein, 126 aa, synthetic construct
EVQLVESGGGVVQPGGSLRLSCAAPGDTFSQNDIGWFRQAPGKEREFVAAIVWPGAETYYRDKVKGRFTLSRDNAKNTVYLQMNSLRPEDTALYYCAQKIFSKTGTYSASWEYDFWGQGTLVTVSS

SEQ ID NO: 774 - protein, 126 aa, synthetic construct
EVQLVESGGGVVQPGGSLRLSCAAPGDTFSENDIGWFRQAPGKEREFVAAIVWPGAETYYRDKVKGRFTLSRDNAKNTVYLQMNSLRPEDTALYYCAQKIFSKTGTYSASWEYDFWGQGTLVTVSS

SEQ ID NO: 775 - protein, 126 aa, synthetic construct
EVQLVESGGGVVQPGGSLRLSCAAPGDTFSENDIGWFRQAPGKEREFVAAIKWPGGETGYKDAVKGRFTLSRDNAKNTVYLQMNSLRPEDTALYYCAVKIFSKTGTYSASWEYDFWGQGTLVTVSS

SEQ ID NO: 776 - protein, 126 aa, synthetic construct
EVQLVESGGGVVQPGGSLRLSCAAPGDTFSQNDIGWFRQAPGKEREFVAAIKWPGGETYYRDKVKGRFTLSRDNAKNTVYLQMNSLRPEDTALYYCAQKIFSKTGTYSASWEYDFWGQGTLVTVSS

SEQ ID NO: 777 - protein, 126 aa, synthetic construct
EVQLVESGGGVVQPGGSLRLSCAAPGDTFSQNDIGWFRQAPGKEREFVAAIVWPGGETGYRDKVKGRFTLSRDNAKNTVYLQMNSLRPEDTALYYCAQKIFSKTGTYSASWEYDFWGQGTLVTVSS

SEQ ID NO: 778 - protein, 126 aa, synthetic construct
EVQLVESGGGVVQPGGSLRLSCAAPGDTFSQNDIGWFRQAPGKEREFVAAIKWPGAETYYKDAVKGRFTLSRDNAKNTVYLQMNSLRPEDTALYYCAVKIFSKTGTYSASWEYDFWGQGTLVTVSS

SEQ ID NO: 779 - protein, 126 aa, synthetic construct
EVQLVESGGGVVQPGGSLRLSCAAPGDTFSQNDIGWFRQAPGKEREFVAAIKWPGAETGYKDAVKGRFTLSRDNAKNTVYLQMNSLRPEDTALYYCAVKIFSKTGTYSASWEYDFWGQGTLVTVSS

SEQ ID NO: 780 - protein, 126 aa, synthetic construct
EVQLVESGGGVVQPGGSLRLSCAAPGDTFSENDIGWFRQAPGKEREFVAAIKWPGAETGYKDAVKGRFTLSRDNAKNTVYLQMNSLRPEDTALYYCAVKIFSKTGTYSASWEYDFWGQGTLVTVSS

SEQ ID NO: 781 - protein, 126 aa, synthetic construct
EVQLVESGGGVVQPGGSLRLSCAAPGDTFSQNDIGWFRQAPGKEREFVAAIVWPGAETGYKDAVKGRFTLSRDNAKNTVYLQMNSLRPEDTALYYCAVKIFSKTGTYSASWEYDFWGQGTLVTVSS

SEQ ID NO: 782 - protein, 126 aa, synthetic construct
EVQLVESGGGVVQPGGSLRLSCAAPGDTFSENDIGWFRQAPGKEREFVAAIVWPGAETGYKDAVKGRFTLSRDNAKNTVYLQMNSLRPEDTALYYCAVKIFSKTGTYSASWEYDFWGQGTLVTVSS

SEQ ID NO: 783 - protein, 126 aa, synthetic construct
EVQLVESGGGVVQPGGSLRLSCAAPGDTFSENDIGWFRQAPGKEREFVAAIKWPGGETYYRDKVKGRFTLSRDNAKNTVYLQMNSLRPEDTALYYCAQKIFSKTGTYSASWEYDFWGQGTLVTVSS

SEQ ID NO: 784 - protein, 126 aa, synthetic construct
EVQLVESGGGVVQPGGSLRLSCAAPGDTFSQNDIGWFRQAPGKEREFVAAIVWPGGETGYRDAVKGRFTLSRDNAKNTVYLQMNSLRPEDTALYYCAVKIFSKTGTYSASWEYDFWGQGTLVTVSS

SEQ ID NO: 785 - protein, 126 aa, synthetic construct
EVQLVESGGGVVQPGGSLRLSCAAPGDTFSQNDIGWFRQAPGKEREFVAAIVWPGAETGYRDAVKGRFTLSRDNAKNTVYLQMNSLRPEDTALYYCAQKIFSKTGTYSASWEYDFWGQGTLVTVSS

SEQ ID NO: 786 - protein, 126 aa, synthetic construct
EVQLVESGGGVVQPGGSLRLSCAAPGDTFSQNDIGWFRQAPGKEREFVAAIVWPGAETYYKDAVKGRFTLSRDNAKNTVYLQMNSLRPEDTALYYCAQKIFSKTGTYSASWEYDFWGQGTLVTVSS

SEQ ID NO: 787 - protein, 126 aa, synthetic construct
EVQLVESGGGVVQPGGSLRLSCAAPGDTFSQNDIGWFRQAPGKEREFVAAIKWPGGETYYKDKVKGRFTLSRDNAKNTVYLQMNSLRPEDTALYYCAVKIFSTTGTYSASWEYDFWGQGTLVTVSS

SEQ ID NO: 788 - protein, 126 aa, synthetic construct
EVQLVESGGGVVQPGGSLRLSCAAPGDTFSQNDIGWFRQAPGKEREFVAAIVWPGGETYYRDAVKGRFTLSRDNAKNTVYLQMNSLRPEDTALYYCAVKIFSTTGTYSASWEYDFWGQGTLVTVSS

SEQ ID NO: 789 - protein, 126 aa, synthetic construct
EVQLVESGGGVVQPGGSLRLSCAAPGDTFSENDIGWFRQAPGKEREFVAAIVWPGGETYYRDAVKGRFTLSRDNAKNTVYLQMNSLRPEDTALYYCAVKIFSTTGTYSASWEYDFWGQGTLVTVSS

SEQ ID NO: 790 - protein, 126 aa, synthetic construct
EVQLVESGGGVVQPGGSLRLSCAAPGDTFSQNDIGWFRQAPGKEREFVAAIKWPGAETGYKDKVKGRFTLSRDNAKNTVYLQMNSLRPEDTALYYCAVKIFSTTGTYSASWEYDFWGQGTLVTVSS

SEQ ID NO: 791 - protein, 126 aa, synthetic construct
EVQLVESGGGVVQPGGSLRLSCAAPGDTFSENDIGWFRQAPGKEREFVAAIKWPGAETGYKDKVKGRFTLSRDNAKNTVYLQMNSLRPEDTALYYCAVKIFSTTGTYSASWEYDFWGQGTLVTVSS

SEQ ID NO: 792 - protein, 126 aa, synthetic construct
EVQLVESGGGVVQPGGSLRLSCAAPGDTFSQNDIGWFRQAPGKEREFVAAIVWPGAETGYKDKVKGRFTLSRDNAKNTVYLQMNSLRPEDTALYYCAVKIFSTTGTYSASWEYDFWGQGTLVTVSS

SEQ ID NO: 793 - protein, 126 aa, synthetic construct
EVQLVESGGGLVQLGGSLRLSCAAPGDTFSENDIGWFRQTPGKEREFVAAIVWPGGETYYRDSVKGRFTLSRDNAKNTVYLQMNNLKPEDTANYSCAVKIFSKTGTYSASWEYDFWGQGTLVTVSS

SEQ ID NO: 794 - protein, 126 aa, synthetic construct
EVQLVESGGGVVQPGGSLRLSCAAPGDTFSENDIGWFRQAPGKEREFVAAIVWPGAETGYKDKVKGRFTLSRDNAKNTVYLQMNSLRPEDTALYYCAVKIFSTTGTYSASWEYDFWGQGTLVTVSS

SEQ ID NO: 795 - protein, 126 aa, synthetic construct
EVQLVESGGGVVQPGGSLRLSCAAPGDTFSENDIGWFRQAPGKEREFVAAIKWPGGETGYKDKVKGRFTLSRDNAKNTVYLQMNSLRPEDTALYYCAVKIFSTTGTYSASWEYDFWGQGTLVTVSS

SEQ ID NO: 796 - protein, 126 aa, synthetic construct
EVQLVESGGGVVQPGGSLRLSCAAPGDTFSQNDIGWFRQAPGKEREFVAAIVWPGGETGYKDKVKGRFTLSRDNAKNTVYLQMNSLRPEDTALYYCAVKIFSTTGTYSASWEYDFWGQGTLVTVSS

SEQ ID NO: 797 - protein, 126 aa, synthetic construct
EVQLVESGGGVVQPGGSLRLSCAAPGDTFSENDIGWFRQAPGKEREFVAAIVWPGGETGYKDKVKGRFTLSRDNAKNTVYLQMNSLRPEDTALYYCAVKIFSTTGTYSASWEYDFWGQGTLVTVSS

SEQ ID NO: 798 - protein, 126 aa, synthetic construct
EVQLVESGGGVVQPGGSLRLSCAAPGDTFSQNDIGWFRQAPGKEREFVAAIKWPGAETYYKDKVKGRFTLSRDNAKNTVYLQMNSLRPEDTALYYCAVKIFSTTGTYSASWEYDFWGQGTLVTVSS

SEQ ID NO: 799 - protein, 126 aa, synthetic construct
EVQLVESGGGVVQPGGSLRLSCAAPGDTFSENDIGWFRQAPGKEREFVAAIKWPGAETYYKDKVKGRFTLSRDNAKNTVYLQMNSLRPEDTALYYCAVKIFSTTGTYSASWEYDFWGQGTLVTVSS

SEQ ID NO: 800 - protein, 126 aa, synthetic construct
EVQLVESGGGVVQPGGSLRLSCAAPGDTFSQNDIGWFRQAPGKEREFVAAIVWPGAETYYKDKVKGRFTLSRDNAKNTVYLQMNSLRPEDTALYYCAVKIFSTTGTYSASWEYDFWGQGTLVTVSS

SEQ ID NO: 801 - protein, 126 aa, synthetic construct
EVQLVESGGGVVQPGGSLRLSCAAPGDTFSQNDIGWFRQAPGKEREFVAAIKWPGGETGYKDKVKGRFTLSRDNAKNTVYLQMNSLRPEDTALYYCAVKIFSTTGTYSASWEYDFWGQGTLVTVSS

SEQ ID NO: 802 - protein, 126 aa, synthetic construct
EVQLVESGGGVVQPGGSLRLSCAAPGDTFSENDIGWFRQAPGKEREFVAAIVWPGAETYYKDKVKGRFTLSRDNAKNTVYLQMNSLRPEDTALYYCAVKIFSTTGTYSASWEYDFWGQGTLVTVSS

SEQ ID NO: 803 - protein, 126 aa, synthetic construct
EVQLVESGGGVVQPGGSLRLSCAAPGDTFSENDIGWFRQAPGKEREFVAAIKWPGGETYYRDAVKGRFTLSRDNAKNTVYLQMNSLRPEDTALYYCAVKIFSTTGTYSASWEYDFWGQGTLVTVSS

SEQ ID NO: 804 - protein, 126 aa, synthetic construct
EVQLVESGGGVVQPGGSLRLSCAAPGDTFSENDIGWFRQAPGKEREFVAAIKWPGAETGYRDAVKGRFTLSRDNAKNTVYLQMNSLRPEDTALYYCAVKIFSTTGTYSASWEYDFWGQGTLVTVSS

SEQ ID NO: 805 - protein, 126 aa, synthetic construct
EVQLVESGGGVVQPGGSLRLSCAAPGDTFSQNDIGWFRQAPGKEREFVAAIVWPGAETYYKDAVKGRFTLSRDNAKNTVYLQMNSLRPEDTALYYCAVKIFSTTGTYSASWEYDFWGQGTLVTVSS

SEQ ID NO: 806 - protein, 126 aa, synthetic construct
EVQLVESGGGVVQPGGSLRLSCAAPGDTFSENDIGWFRQAPGKEREFVAAIVWPGAETYYKDAVKGRFTLSRDNAKNTVYLQMNSLRPEDTALYYCAVKIFSTTGTYSASWEYDFWGQGTLVTVSS

SEQ ID NO: 807 - protein, 126 aa, synthetic construct
EVQLVESGGGVVQPGGSLRLSCAAPGDTFSQNDIGWFRQAPGKEREFVAAIKWPGGETYYKDAVKGRFTLSRDNAKNTVYLQMNSLRPEDTALYYCAVKIFSTTGTYSASWEYDFWGQGTLVTVSS

SEQ ID NO: 808 - protein, 126 aa, synthetic construct
EVQLVESGGGVVQPGGSLRLSCAAPGDTFSENDIGWFRQAPGKEREFVAAIKWPGGETYYKDAVKGRFTLSRDNAKNTVYLQMNSLRPEDTALYYCAVKIFSTTGTYSASWEYDFWGQGTLVTVSS

SEQ ID NO: 809 - protein, 126 aa, synthetic construct
EVQLVESGGGVVQPGGSLRLSCAAPGDTFSQNDIGWFRQAPGKEREFVAAIVWPGGETYYKDAVKGRFTLSRDNAKNTVYLQMNSLRPEDTALYYCAVKIFSTTGTYSASWEYDFWGQGTLVTVSS

SEQ ID NO: 810 - protein, 126 aa, synthetic construct
EVQLVESGGGVVQPGGSLRLSCAAPGDTFSQNDIGWFRQAPGKEREFVAAIKWPGAETGYRDAVKGRFTLSRDNAKNTVYLQMNSLRPEDTALYYCAVKIFSTTGTYSASWEYDFWGQGTLVTVSS

SEQ ID NO: 811 - protein, 126 aa, synthetic construct
EVQLVESGGGVVQPGGSLRLSCAAPGDTFSQNDIGWFRQAPGKEREFVAAIVWPGAETGYRDAVKGRFTLSRDNAKNTVYLQMNSLRPEDTALYYCAVKIFSTTGTYSASWEYDFWGQGTLVTVSS

SEQ ID NO: 812 - protein, 126 aa, synthetic construct
EVQLVESGGGVVQPGGSLRLSCAAPGDTFSQNDIGWFRQAPGKEREFVAAIVWPGAETYYRDAVKGRFTLSRDNAKNTVYLQMNSLRPEDTALYYCAVKIFSTTGTYSASWEYDFWGQGTLVTVSS

SEQ ID NO: 813 - protein, 126 aa, synthetic construct
EVQLVESGGGVVQPGGSLRLSCAAPGDTFSQNDIGWFRQAPGKEREFVAAIKWPGGETGYRDAVKGRFTLSRDNAKNTVYLQMNSLRPEDTALYYCAVKIFSTTGTYSASWEYDFWGQGTLVTVSS

SEQ ID NO: 814 - protein, 126 aa, synthetic construct
EVQLVESGGGVVQPGGSLRLSCAAPGDTFSENDIGWFRQAPGKEREFVAAIKWPGGETGYRDAVKGRFTLSRDNAKNTVYLQMNSLRPEDTALYYCAVKIFSTTGTYSASWEYDFWGQGTLVTVSS

SEQ ID NO: 815 - protein, 126 aa, synthetic construct
EVQLVESGGGVVQPGGSLRLSCAAPGDTFSQNDIGWFRQAPGKEREFVAAIVWPGGETGYRDAVKGRFTLSRDNAKNTVYLQMNSLRPEDTALYYCAVKIFSTTGTYSASWEYDFWGQGTLVTVSS

SEQ ID NO: 816 - protein, 126 aa, synthetic construct
EVQLVESGGGVVQPGGSLRLSCAAPGDTFSENDIGWFRQAPGKEREFVAAIVWPGGETGYRDAVKGRFTLSRDNAKNTVYLQMNSLRPEDTALYYCAVKIFSTTGTYSASWEYDFWGQGTLVTVSS

SEQ ID NO: 817 - protein, 126 aa, synthetic construct
EVQLVESGGGVVQPGGSLRLSCAAPGDTFSQNDIGWFRQAPGKEREFVAAIKWPGAETYYRDAVKGRFTLSRDNAKNTVYLQMNSLRPEDTALYYCAVKIFSTTGTYSASWEYDFWGQGTLVTVSS

SEQ ID NO: 818 - protein, 126 aa, synthetic construct
EVQLVESGGGVVQPGGSLRLSCAAPGDTFSENDIGWFRQAPGKEREFVAAIKWPGAETYYRDAVKGRFTLSRDNAKNTVYLQMNSLRPEDTALYYCAVKIFSTTGTYSASWEYDFWGQGTLVTVSS

SEQ ID NO: 819 - protein, 126 aa, synthetic construct
EVQLVESGGGVVQPGGSLRLSCAAPGDTFSQNDIGWFRQAPGKEREFVAAIKWPGGETYYRDAVKGRFTLSRDNAKNTVYLQMNSLRPEDTALYYCAVKIFSTTGTYSASWEYDFWGQGTLVTVSS

SEQ ID NO: 820 - protein, 126 aa, synthetic construct
EVQLVESGGGVVQPGGSLRLSCAAPGDTFSENDIGWFRQAPGKEREFVAAIKWPGAETYYKDAVKGRFTLSRDNAKNTVYLQMNSLRPEDTALYYCAQKIFSKTGTYSASWEYDFWGQGTLVTVSS

SEQ ID NO: 821 - protein, 126 aa, synthetic construct
EVQLVESGGGVVQPGGSLRLSCAAPGDTFSQNDIGWFRQAPGKEREFVAAIKWPGAETGYRDAVKGRFTLSRDNAKNTVYLQMNSLRPEDTALYYCAQKIFSKTGTYSASWEYDFWGQGTLVTVSS

SEQ ID NO: 822 - protein, 126 aa, synthetic construct
EVQLVESGGGVVQPGGSLRLSCAAPGDTFSENDIGWFRQAPGKEREFVAAIVWPGGETYYKDKVKGRFTLSRDNAKNTVYLQMNSLRPEDTALYYCAVKIFSTTGTYSASWEYDFWGQGTLVTVSS

SEQ ID NO: 823 - protein, 126 aa, synthetic construct
EVQLVESGGGVVQPGGSLRLSCAAPGDTFSENDIGWFRQAPGKEREFVAAIKWPGAETGYKDAVKGRFTLSRDNAKNTVYLQMNSLRPEDTALYYCAQKIFSKTGTYSASWEYDFWGQGTLVTVSS

SEQ ID NO: 824 - protein, 126 aa, synthetic construct
EVQLVESGGGVVQPGGSLRLSCAAPGDTFSENDIGWFRQAPGKEREFVAAIVWPGAETGYKDAVKGRFTLSRDNAKNTVYLQMNSLRPEDTALYYCAQKIFSKTGTYSASWEYDFWGQGTLVTVSS

SEQ ID NO: 825 - protein, 126 aa, synthetic construct
EVQLVESGGGVVQPGGSLRLSCAAPGDTFSQNDIGWFRQAPGKEREFVAAIKWPGGETGYKDAVKGRFTLSRDNAKNTVYLQMNSLRPEDTALYYCAQKIFSKTGTYSASWEYDFWGQGTLVTVSS

SEQ ID NO: 826 - protein, 126 aa, synthetic construct
EVQLVESGGGVVQPGGSLRLSCAAPGDTFSENDIGWFRQAPGKEREFVAAIKWPGGETGYKDAVKGRFTLSRDNAKNTVYLQMNSLRPEDTALYYCAQKIFSKTGTYSASWEYDFWGQGTLVTVSS

SEQ ID NO: 827 - protein, 126 aa, synthetic construct
EVQLVESGGGVVQPGGSLRLSCAAPGDTFSQNDIGWFRQAPGKEREFVAAIVWPGGETGYKDAVKGRFTLSRDNAKNTVYLQMNSLRPEDTALYYCAQKIFSKTGTYSASWEYDFWGQGTLVTVSS

SEQ ID NO: 828 - protein, 126 aa, synthetic construct
EVQLVESGGGVVQPGGSLRLSCAAPGDTFSENDIGWFRQAPGKEREFVAAIVWPGGETGYKDAVKGRFTLSRDNAKNTVYLQMNSLRPEDTALYYCAQKIFSKTGTYSASWEYDFWGQGTLVTVSS

SEQ ID NO: 829 - protein, 126 aa, synthetic construct
EVQLVESGGGVVQPGGSLRLSCAAPGDTFSQNDIGWFRQAPGKEREFVAAIKWPGAETYYKDAVKGRFTLSRDNAKNTVYLQMNSLRPEDTALYYCAQKIFSKTGTYSASWEYDFWGQGTLVTVSS

SEQ ID NO: 830 - protein, 126 aa, synthetic construct
EVQLVESGGGVVQPGGSLRLSCAAPGDTFSQNDIGWFRQAPGKEREFVAAIVWPGAETGYKDAVKGRFTLSRDNAKNTVYLQMNSLRPEDTALYYCAQKIFSKTGTYSASWEYDFWGQGTLVTVSS

SEQ ID NO: 831 - protein, 126 aa, synthetic construct
EVQLVESGGGVVQPGGSLRLSCAAPGDTFSENDIGWFRQAPGKEREFVAAIKWPGGETYYKDKVKGRFTLSRDNAKNTVYLQMNSLRPEDTALYYCAVKIFSTTGTYSASWEYDFWGQGTLVTVSS

SEQ ID NO: 832 - protein, 126 aa, synthetic construct
EVQLVESGGGVVQPGGSLRLSCAAPGDTFSENDIGWFRQAPGKEREFVAAIVWPGAETYYKDAVKGRFTLSRDNAKNTVYLQMNSLRPEDTALYYCAQKIFSKTGTYSASWEYDFWGQGTLVTVSS

SEQ ID NO: 833 - protein, 126 aa, synthetic construct
EVQLVESGGGVVQPGGSLRLSCAAPGDTFSQNDIGWFRQAPGKEREFVAAIKWPGGETYYKDAVKGRFTLSRDNAKNTVYLQMNSLRPEDTALYYCAQKIFSKTGTYSASWEYDFWGQGTLVTVSS

SEQ ID NO: 834 - protein, 126 aa, synthetic construct
EVQLVESGGGVVQPGGSLRLSCAAPGDTFSENDIGWFRQAPGKEREFVAAIKWPGGETYYKDAVKGRFTLSRDNAKNTVYLQMNSLRPEDTALYYCAQKIFSKTGTYSASWEYDFWGQGTLVTVSS

SEQ ID NO: 835 - protein, 126 aa, synthetic construct
EVQLVESGGGVVQPGGSLRLSCAAPGDTFSQNDIGWFRQAPGKEREFVAAIVWPGGETYYKDAVKGRFTLSRDNAKNTVYLQMNSLRPEDTALYYCAQKIFSKTGTYSASWEYDFWGQGTLVTVSS

SEQ ID NO: 836 - protein, 126 aa, synthetic construct
EVQLVESGGGVVQPGGSLRLSCAAPGDTFSENDIGWFRQAPGKEREFVAAIVWPGGETYYKDAVKGRFTLSRDNAKNTVYLQMNSLRPEDTALYYCAQKIFSKTGTYSASWEYDFWGQGTLVTVSS

SEQ ID NO: 837 - protein, 126 aa, synthetic construct
EVQLVESGGGVVQPGGSLRLSCAAPGDTFSQNDIGWFRQAPGKEREFVAAIVWPGGETYYKDKVKGRFTLSRDNAKNTVYLQMNSLRPEDTALYYCAVKIFSTTGTYSASWEYDFWGQGTLVTVSS

SEQ ID NO: 838 - protein, 126 aa, synthetic construct
EVQLVESGGGVVQPGGSLRLSCAAPGDTFSENDIGWFRQAPGKEREFVAAIKWPGAETGYRDAVKGRFTLSRDNAKNTVYLQMNSLRPEDTALYYCAQKIFSKTGTYSASWEYDFWGQGTLVTVSS

SEQ ID NO: 839 - protein, 126 aa, synthetic construct
EVQLVESGGGVVQPGGSLRLSCAAPGDTFSQNDIGWFRQAPGKEREFVAAIKWPGAETGYKDAVKGRFTLSRDNAKNTVYLQMNSLRPEDTALYYCAQKIFSKTGTYSASWEYDFWGQGTLVTVSS

SEQ ID NO: 840 - protein, 126 aa, synthetic construct
EVQLVESGGGVVQPGGSLRLSCAAPGDTFSQNDIGWFRQAPGKEREFVAAIKWPGAETYYRDKVKGRFTLSRDNAKNTVYLQMNSLRPEDTALYYCAVKIFSTTGTYSASWEYDFWGQGTLVTVSS

SEQ ID NO: 841 - protein, 126 aa, synthetic construct
EVQLVESGGGVVQPGGSLRLSCAAPGDTFSENDIGWFRQAPGKEREFVAAIVWPGGETYYRDKVKGRFTLSRDNAKNTVYLQMNSLRPEDTALYYCAVKIFSTTGTYSASWEYDFWGQGTLVTVSS

SEQ ID NO: 842 - protein, 126 aa, synthetic construct
EVQLVESGGGVVQPGGSLRLSCAAPGDTFSENDIGWFRQAPGKEREFVAAIKWPGAETGYRDKVKGRFTLSRDNAKNTVYLQMNSLRPEDTALYYCAVKIFSTTGTYSASWEYDFWGQGTLVTVSS

SEQ ID NO: 843 - protein, 126 aa, synthetic construct
EVQLVESGGGVVQPGGSLRLSCAAPGDTFSQNDIGWFRQAPGKEREFVAAIVWPGAETGYRDKVKGRFTLSRDNAKNTVYLQMNSLRPEDTALYYCAVKIFSTTGTYSASWEYDFWGQGTLVTVSS

SEQ ID NO: 844 - protein, 126 aa, synthetic construct
EVQLVESGGGVVQPGGSLRLSCAAPGDTFSENDIGWFRQAPGKEREFVAAIVWPGAETGYRDKVKGRFTLSRDNAKNTVYLQMNSLRPEDTALYYCAVKIFSTTGTYSASWEYDFWGQGTLVTVSS

SEQ ID NO: 845 - protein, 126 aa, synthetic construct
EVQLVESGGGVVQPGGSLRLSCAAPGDTFSQNDIGWFRQAPGKEREFVAAIKWPGGETGYRDKVKGRFTLSRDNAKNTVYLQMNSLRPEDTALYYCAVKIFSTTGTYSASWEYDFWGQGTLVTVSS

SEQ ID NO: 846 - protein, 126 aa, synthetic construct
EVQLVESGGGVVQPGGSLRLSCAAPGDTFSENDIGWFRQAPGKEREFVAAIKWPGGETGYRDKVKGRFTLSRDNAKNTVYLQMNSLRPEDTALYYCAVKIFSTTGTYSASWEYDFWGQGTLVTVSS

SEQ ID NO: 847 - protein, 126 aa, synthetic construct
EVQLVESGGGVVQPGGSLRLSCAAPGDTFSQNDIGWFRQAPGKEREFVAAIVWPGGETGYRDKVKGRFTLSRDNAKNTVYLQMNSLRPEDTALYYCAVKIFSTTGTYSASWEYDFWGQGTLVTVSS

SEQ ID NO: 848 - protein, 126 aa, synthetic construct
EVQLVESGGGVVQPGGSLRLSCAAPGDTFSQNDIGWFRQAPGKEREFVAAIKWPGAETGYRDKVKGRFTLSRDNAKNTVYLQMNSLRPEDTALYYCAVKIFSTTGTYSASWEYDFWGQGTLVTVSS

SEQ ID NO: 849 - protein, 126 aa, synthetic construct
EVQLVESGGGVVQPGGSLRLSCAAPGDTFSENDIGWFRQAPGKEREFVAAIVWPGGETGYRDKVKGRFTLSRDNAKNTVYLQMNSLRPEDTALYYCAVKIFSTTGTYSASWEYDFWGQGTLVTVSS

SEQ ID NO: 850 - protein, 126 aa, synthetic construct
EVQLVESGGGVVQPGGSLRLSCAAPGDTFSENDIGWFRQAPGKEREFVAAIKWPGAETYYRDKVKGRFTLSRDNAKNTVYLQMNSLRPEDTALYYCAVKIFSTTGTYSASWEYDFWGQGTLVTVSS

SEQ ID NO: 851 - protein, 126 aa, synthetic construct
EVQLVESGGGVVQPGGSLRLSCAAPGDTFSQNDIGWFRQAPGKEREFVAAIVWPGAETYYRDKVKGRFTLSRDNAKNTVYLQMNSLRPEDTALYYCAVKIFSTTGTYSASWEYDFWGQGTLVTVSS

SEQ ID NO: 852 - protein, 126 aa, synthetic construct
EVQLVESGGGVVQPGGSLRLSCAAPGDTFSENDIGWFRQAPGKEREFVAAIVWPGAETYYRDKVKGRFTLSRDNAKNTVYLQMNSLRPEDTALYYCAVKIFSTTGTYSASWEYDFWGQGTLVTVSS

SEQ ID NO: 853 - protein, 126 aa, synthetic construct
EVQLVESGGGVVQPGGSLRLSCAAPGDTFSQNDIGWFRQAPGKEREFVAAIKWPGGETYYRDKVKGRFTLSRDNAKNTVYLQMNSLRPEDTALYYCAVKIFSTTGTYSASWEYDFWGQGTLVTVSS

SEQ ID NO: 854 - protein, 126 aa, synthetic construct
EVQLVESGGGVVQPGGSLRLSCAAPGDTFSENDIGWFRQAPGKEREFVAAIKWPGGETYYRDKVKGRFTLSRDNAKNTVYLQMNSLRPEDTALYYCAVKIFSTTGTYSASWEYDFWGQGTLVTVSS

SEQ ID NO: 855 - protein, 126 aa, synthetic construct
EVQLVESGGGVVQPGGSLRLSCAAPGDTFSQNDIGWFRQAPGKEREFVAAIVWPGGETYYRDKVKGRFTLSRDNAKNTVYLQMNSLRPEDTALYYCAVKIFSTTGTYSASWEYDFWGQGTLVTVSS

SEQ ID NO: 856 - protein, 126 aa, synthetic construct
EVQLVESGGGVVQPGGSLRLSCAAPGDTFSENDIGWFRQAPGKEREFVAAIKWPGAETYYRDAVKGRFTLSRDNAKNTVYLQMNSLRPEDTALYYCAVKIFSKTGTYSASWEYDFWGQGTLVTVSS

SEQ ID NO: 857 - protein, 126 aa, synthetic construct
EVQLVESGGGVVQPGGSLRLSCAAPGDTFSQNDIGWFRQAPGKEREFVAAIKWPGAETYYKDAVKGRFTLSRDNAKNTVYLQMNSLRPEDTALYYCAVKIFSTTGTYSASWEYDFWGQGTLVTVSS

SEQ ID NO: 858 - protein, 126 aa, synthetic construct
EVQLVESGGGVVQPGGSLRLSCAAPGDTFSENDIGWFRQTPGKEREFVAAIVWPGGETYYRDSVKGRFTLSRDNAKNTVYLQMNSLRPEDTALYSCAVKHFSKTGTYSASWEYDFWGQGTLVTVSS

SEQ ID NO: 859 - protein, 126 aa, synthetic construct
EVQLVESGGGVVQPGGSLRLSCAAPGDTFSENDIGWFRQTPGKEREFVAAIVWPGGETYYRDSVKGRFTLSRDNAKNTVYLQMNSLRPEDTALYSCAVKIFSKTGTYSASWEQDFWGQGTLVTVSS

SEQ ID NO: 860 - protein, 126 aa, synthetic construct
EVQLVESGGGVVQPGGSLRLSCAAPGDTFSENDIGWFRQTPGKEREFVAAIVWPGGETYYRDSVKGRFTLSRDNAKNTVYLQMNSLRPEDTALYSCAVKIFSKTGTYSASWELDFWGQGTLVTVSS

SEQ ID NO: 861 - protein, 126 aa, synthetic construct
EVQLVESGGGVVQPGGSLRLSCAAPGDTFSENDIGWFRQTPGKEREFVAAIVWPGGETYYRDSVKGRFTLSRDNAKNTVYLQMNSLRPEDTALYSCAVKIFSKTGTYSASWEGDFWGQGTLVTVSS

SEQ ID NO: 862 - protein, 126 aa, synthetic construct
EVQLVESGGGVVQPGGSLRLSCAAPGDTFSENDIGWFRQTPGKEREFVAAIVWPGGETYYRDSVKGRFTLSRDNAKNTVYLQMNSLRPEDTALYSCAVKIFSKTGTYSASWRYDFWGQGTLVTVSS

SEQ ID NO: 863 - protein, 126 aa, synthetic construct
EVQLVESGGGVVQPGGSLRLSCAAPGDTFSENDIGWFRQTPGKEREFVAAIVWPGGETYYRDSVKGRFTLSRDNAKNTVYLQMNSLRPEDTALYSCAVKIFSKTGTYSASWPYDFWGQGTLVTVSS

SEQ ID NO: 864 - protein, 126 aa, synthetic construct
EVQLVESGGGVVQPGGSLRLSCAAPGDTFSENDIGWFRQTPGKEREFVAAIVWPGGETYYRDSVKGRFTLSRDNAKNTVYLQMNSLRPEDTALYSCAVKIFSKTGTYSASWIYDFWGQGTLVTVSS

SEQ ID NO: 865 - protein, 126 aa, synthetic construct
EVQLVESGGGVVQPGGSLRLSCAAPGDTFSENDIGWFRQTPGKEREFVAAIVWPGGETYYRDSVKGRFTLSRDNAKNTVYLQMNSLRPEDTALYSCAVKIFSKTGTYSASWEYLFWGQGTLVTVSS

SEQ ID NO: 866 - protein, 126 aa, synthetic construct
EVQLVESGGGVVQPGGSLRLSCAAPGDTFSENDIGWFRQTPGKEREFVAAIVWPGGETYYRDSVKGRFTLSRDNAKNTVYLQMNSLRPEDTALYSCAVKIFSKTGTYSASWTYDFWGQGTLVTVSS

SEQ ID NO: 867 - protein, 126 aa, synthetic construct
EVQLVESGGGVVQPGGSLRLSCAAPGDTFSENDIGWFRQTPGKEREFVAAIVWPGGETYYRDSVKGRFTLSRDNAKNTVYLQMNSLRPEDTALYSCAVKIFSKTGTYSASWAYDFWGQGTLVTVSS

SEQ ID NO: 868 - protein, 126 aa, synthetic construct
EVQLVESGGGVVQPGGSLRLSCAAPGDTFSENDIGWFRQTPGKEREFVAAIVWPGGETYYRDSVKGRFTLSRDNAKNTVYLQMNSLRPEDTALYSCAVKIFSKTGTYSASWFYDFWGQGTLVTVSS

SEQ ID NO: 869 - protein, 126 aa, synthetic construct
EVQLVESGGGVVQPGGSLRLSCAAPGDTFSENDIGWFRQTPGKEREFVAAIVWPGGETYYRDSVKGRFTLSRDNAKNTVYLQMNSLRPEDTALYSCAVKIFSKTGTYSASWDYDFWGQGTLVTVSS

SEQ ID NO: 870 - protein, 126 aa, synthetic construct
EVQLVESGGGVVQPGGSLRLSCAAPGDTFSENDIGWFRQTPGKEREFVAAIVWPGGETYYRDSVKGRFTLSRDNAKNTVYLQMNSLRPEDTALYSCAVKIFSKTGTYSASWSYDFWGQGTLVTVSS

SEQ ID NO: 871 - protein, 126 aa, synthetic construct
EVQLVESGGGVVQPGGSLRLSCAAPGDTFSENDIGWFRQTPGKEREFVAAIVWPGGETYYRDSVKGRFTLSRDNAKNTVYLQMNSLRPEDTALYSCAVKIFSKTGTYSASWHYDFWGQGTLVTVSS

SEQ ID NO: 872 - protein, 126 aa, synthetic construct
EVQLVESGGGVVQPGGSLRLSCAAPGDTFSENDIGWFRQTPGKEREFVAAIVWPGGETYYRDSVKGRFTLSRDNAKNTVYLQMNSLRPEDTALYSCAVKIFSKTGTYSASWVYDFWGQGTLVTVSS

SEQ ID NO: 873 - protein, 126 aa, synthetic construct
EVQLVESGGGVVQPGGSLRLSCAAPGDTFSENDIGWFRQTPGKEREFVAAIVWPGGETYYRDSVKGRFTLSRDNAKNTVYLQMNSLRPEDTALYSCAVKIFSKTGTYSASWKYDFWGQGTLVTVSS

SEQ ID NO: 874 - protein, 126 aa, synthetic construct
EVQLAESGGGVVQPGGSLRLSCAAPGDTFSENDIGWFRQTPGKEREFVAAIVWPGGETYYRDSVKGRFTLSRDNAKNTVYLQMNSLRPEDTALYSCAVKIFSKTGTYSASWIYDFWGQGTLVTVSS

SEQ ID NO: 875 - protein, 126 aa, synthetic construct
EVQLVESGGGVVQPGGSLRLSCAAPGDTFSENDIGWFRQTPGKEREFVAAIVWPGGETYYRDSVKGRFTLSRDNAKNTVYLQMNSLRPEDTALYSCAVKIFSKTGTYSASWEVDFWGQGTLVTVSS

SEQ ID NO: 876 - protein, 126 aa, synthetic construct
EVQLVESGGGVVQPGGSLRLSCAAPGDTFSENDIGWFRQTPGKEREFVAAIVWPGGETYYRDSVKGRFTLSRDNAKNTVYLQMNSLRPEDTALYSCAVKIFSKTGTYSASWEYEFWGQGTLVTVSS

SEQ ID NO: 877 - protein, 126 aa, synthetic construct
EVQLVESGGGVVQPGGSLRLSCAAPGDTFSENDIGWFRQTPGKEREFVAAIVWPGGETYYRDSVKGRFTLSRDNAKNTVYLQMNSLRPEDTALYSCAVKIFSKTGTYSASWEPDFWGQGTLVTVSS

SEQ ID NO: 878 - protein, 126 aa, synthetic construct
EVQLVESGGGVVQPGGSLRLSCAAPGDTFSENDIGWFRQTPGKEREFVAAIVWPGGETYYRDSVKGRFTLSRDNAKNTVYLQMNSLRPEDTALYSCAVKIFSKTGTYSASWEYFFWGQGTLVTVSS

SEQ ID NO: 879 - protein, 126 aa, synthetic construct
EVQLVESGGGVVQPGGSLRLSCAAPGDTFSENDIGWFRQTPGKEREFVAAIVWPGGETYYRDSVKGRFTLSRDNAKNTVYLQMNSLRPEDTALYSCAVKIFSKTGTYSASWEYPFWGQGTLVTVSS

SEQ ID NO: 880 - protein, 126 aa, synthetic construct
EVQLVESGGGVVQPGGSLRLSCAAPGDTFSENDIGWFRQTPGKEREFVAAIVWPGGETYYRDSVKGRFTLSRDNAKNTVYLQMNSLRPEDTALYSCAVKIFSKTGTYSASWEYRFWGQGTLVTVSS

SEQ ID NO: 881 - protein, 126 aa, synthetic construct
EVQLVESGGGVVQPGGSLRLSCAAPGDTFSENDIGWFRQTPGKEREFVAAIVWPGGETYYRDSVKGRFTLSRDNAKNTVYLQMNSLRPEDTALYSCAVKIFSKTGTYSASWEYTFWGQGTLVTVSS

SEQ ID NO: 882 - protein, 126 aa, synthetic construct
EVQLVESGGGVVQPGGSLRLSCAAPGDTFSENDIGWFRQTPGKEREFVAAIVWPGGETYYRDSVKGRFTLSRDNAKNTVYLQMNSLRPEDTALYSCAVKIFSKTGTYSASWEYIFWGQGTLVTVSS

SEQ ID NO: 883 - protein, 126 aa, synthetic construct
EVQLVESGGGVVQPGGSLRLSCAAPGDTFSENDIGWFRQTPGKEREFVAAIVWPGGETYYRDSVKGRFTLSRDNAKNTVYLQMNSLRPEDTALYSCAVKIFSKTGTYSASWEYSFWGQGTLVTVSS

SEQ ID NO: 884 - protein, 126 aa, synthetic construct
EVQLVESGGGVVQPGGSLRLSCAAPGDTFSENDIGWFRQTPGKEREFVAAIVWPGGETYYRDSVKGRFTLSRDNAKNTVYLQMNSLRPEDTALYSCAVKIFSKTGTYSASWEYYFWGQGTLVTVSS

SEQ ID NO: 885 - protein, 126 aa, synthetic construct
EVQLVESGGGVVQPGGSLRLSCAAPGDTFSENDIGWFRQTPGKEREFVAAIVWPGGETYYRDSVKGRFTLSRDNAKNTVYLQMNSLRPEDTALYSCAVKIFSKTGTYSASWEYGFWGQGTLVTVSS

SEQ ID NO: 886 - protein, 126 aa, synthetic construct
EVQLVESGGGVVQPGGSLRLSCAAPGDTFSENDIGWFRQTPGKEREFVAAIVWPGGETYYRDSVKGRFTLSRDNAKNTVYLQMNSLRPEDTALYSCAVKIFSKTGTYSASWEKDFWGQGTLVTVSS

SEQ ID NO: 887 - protein, 126 aa, synthetic construct
EVQLVESGGGVVQPGGSLRLSCAAPGDTFSENDIGWFRQTPGKEREFVAAIVWPGGETYYRDSVKGRFTLSRDNAKNTVYLQMNSLRPEDTALYSCAVKIFSKTGTYSASWEEDFWGQGTLVTVSS

SEQ ID NO: 888 - protein, 126 aa, synthetic construct
EVQLVESGGGVVQPGGSLRLSCAAPGDTFSENDIGWFRQTPGKEREFVAAIVWPGGETYYRDSVKGRFTLSRDNAKNTVYLQMNSLRPEDTALYSCAVKIFSKTGTYSASWEIDFWGQGTLVTVSS

SEQ ID NO: 889 - protein, 126 aa, synthetic construct
EVQLVESGGGVVQPGGSLRLSCAAPGDTFSENDIGWFRQTPGKEREFVAAIVWPGGETYYRDSVKGRFTLSRDNAKNTVYLQMNSLRPEDTALYSCAVKIFSKTGTYSASWERDFWGQGTLVTVSS

SEQ ID NO: 890 - protein, 126 aa, synthetic construct
EVQLVESGGGVVQPGGSLRLSCAAPGDTFSENDIGWFRQTPGKEREFVAAIVWPGGETYYRDSVKGRFTLSRDNAKNTVYLQMNSLRPEDTALYSCAVKIFSKTGTYSASWEHDFWGQGTLVTVSS

SEQ ID NO: 891 - protein, 126 aa, synthetic construct
EVQLVESGGGVVQPGGSLRLSCAAPGDTFSENDIGWFRQTPGKEREFVAAIVWPGGETYYRDSVKGRFTLSRDNAKNTVYLQMNSLRPEDTALYSCAVKIFSKTGTYSASWEDDFWGQGTLVTVSS

SEQ ID NO: 892 - protein, 126 aa, synthetic construct
EVQLVESGGGVVQPGGSLRLSCAAPGDTFSENDIGWFRQAPGKEREFVAAIVWPGGETYYKDKVKGRFTLSRDNAKNTVYLQMNSLRPEDTALYYCAVKIFSKTGTYSASWEYDFWGQGTLVTVSS

SEQ ID NO: 893 - protein, 126 aa, synthetic construct
EVQLVESGGGVVQPGGSLRLSCAAPGDTFSENDIGWFRQTPGKEREFVAAIVWPGGETYYRDSVKGRFTLSRDNAKNTVYLQMNSLRPEDTALYSCAVKIFSKTGTYSASWEYAFWGQGTLVTVSS

SEQ ID NO: 894 - protein, 126 aa, synthetic construct
EVQLVESGGGVVQPGGSLRLSCAAPGDTFSENDIGWFRQTPGKEREFVAAIVWPGGETYYRDSVKGRFTLSRDNAKNTVYLQMNSLRPEDTALYSCAVKIFSKTGTYSASWEYHFWGQGTLVTVSS

SEQ ID NO: 895 - protein, 126 aa, synthetic construct
EVQLVESGGGVVQPGGSLRLSCAAPGDTFSENDIGWFRQTPGKEREFVAAIVWPGGETYYRDSVKGRFTLSRDNAKNTVYLQMNSLRPEDTALYSCAVKIFSKTGTYSATWEYDFWGQGTLVTVSS

SEQ ID NO: 896 - protein, 126 aa, synthetic construct
EVQLVESGGGVVQPGGSLRLSCAAPGDTFSENDIGWFRQTPGKEREFVAAIVWPGGETYYRDSVKGRFTLSRDNAKNTVYLQMNSLRPEDTALYSCAVKIFSKTGTYSAIWEYDFWGQGTLVTVSS

SEQ ID NO: 897 - protein, 126 aa, synthetic construct
EVQLVESGGGVVQPGGSLRLSCAAPGDTFSENDIGWFRQTPGKEREFVAAIVWPGGETYYRDSVKGRFTLSRDNAKNTVYLQMNSLRPEDTALYSCAVKIFSKTGTYSADWEYDFWGQGTLVTVSS

SEQ ID NO: 898 - protein, 126 aa, synthetic construct
EVQLVESGGGVVQPGGSLRLSCAAPGDTFSENDIGWFRQTPGKEREFVAAIVWPGGETYYRDSVKGRFTLSRDNAKNTVYLQMNSLRPEDTALYSCAVKIFSKTGTYSAHWEYDFWGQGTLVTVSS

SEQ ID NO: 899 - protein, 126 aa, synthetic construct
EVQLVESGGGVVQPGGSLRLSCAAPGDTFSENDIGWFRQTPGKEREFVAAIVWPGGETYYRDSVKGRFTLSRDNAKNTVYLQMNSLRPEDTALYSCAVKIFSKTGTYSAVWDYDFWGQGTLVTVSS

SEQ ID NO: 900 - protein, 126 aa, synthetic construct
EVQLVESGGGVVQPGGSLRLSCAAPGDTFSENDIGWFRQTPGKEREFVAAIVWPGGETYYRDSVKGRFTLSRDNAKNTVYLQMNSLRPEDTALYSCAVKIFSKTGTYSARWEYDFWGQGTLVTVSS

SEQ ID NO: 901 - protein, 126 aa, synthetic construct
EVQLVESGGGVVQPGGSLRLSCAAPGDTFSENDIGWFRQTPGKEREFVAAIVWPGGETYYRDSVKGRFTLSRDNAKNTVYLQMNSLRPEDTALYSCAVKIFSKTGTYSAPWEYDFWGQGTLVTVSS

SEQ ID NO: 902 - protein, 126 aa, synthetic construct
EVQLVESGGGVVQPGGSLRLSCAAPGDTFSENDIGWFRQTPGKEREFVAAIVWPGGETYYRDSVKGRFTLSRDNAKNTVYLQMNSLRPEDTALYSCAVKIFSKTGTYSALWEYDFWGQGTLVTVSS

SEQ ID NO: 903 - protein, 126 aa, synthetic construct
EVQLVESGGGVVQPGGSLRLSCAAPGDTFSENDIGWFRQTPGKEREFVAAIVWPGGETYYRDSVKGRFTLSRDNAKNTVYLQMNSLRPEDTALYSCAVKIFSKTGTYSASWLYDFWGQGTLVTVSS

SEQ ID NO: 904 - protein, 126 aa, synthetic construct
EVQLVESGGGVVQPGGSLRLSCAAPGDTFSENDIGWFRQTPGKEREFVAAIVWPGGETYYRDSVKGRFTLSRDNAKNTVYLQMNSLRPEDTALYSCAVKIFSKTGTYSAKWEYDFWGQGTLVTVSS

SEQ ID NO: 905 - protein, 126 aa, synthetic construct
EVQLVESGGGVVQPGGSLRLSCAAPGDTFSENDIGWFRQTPGKEREFVAAIVWPGGETYYRDSVKGRFTLSRDNAKNTVYLQMNSLRPEDTALYSCAVKIFSKTGTYSAGWEYDFWGQGTLVTVSS

SEQ ID NO: 906 - protein, 126 aa, synthetic construct
EVQLVESGGGVVQPGGSLRLSCAAPGDTFSENDIGWFRQTPGKEREFVAAIVWPGGETYYRDSVKGRFTLSRDNAKNTVYLQMNSLRPEDTALYSCAVKIFSKTGTYSAYWEYDFWGQGTLVTVSS

SEQ ID NO: 907 - protein, 126 aa, synthetic construct
EVQLVESGGGVVQPGGSLRLSCAAPGDTFSENDIGWFRQTPGKEREFVAAIVWPGGETYYRDSVKGRFTLSRDNAKNTVYLQMNSLRPEDTALYSCAVKIFSKTGTYSAVWEYDFWGQGTLVTVSS

SEQ ID NO: 908 - protein, 126 aa, synthetic construct
EVQLVESGGGVVQPGGSLRLSCAAPGDTFSENDIGWFRQTPGKEREFVAAIVWPGGETYYRDSVKGRFTLSRDNAKNTVYLQMNSLRPEDTALYSCAVKIFSKTGTYSTSWEYDFWGRGTLVTVSS

SEQ ID NO: 909 - protein, 126 aa, synthetic construct
EVQLVESGGGVVQPGGSLRLSCAAPGDTFSENDIGWFRQTPGKEREFVAAIVWPGGETYYRDSVKGRFTLSRDNAKNTVYLQMNSLRPEDTALYSCAVKIFSKTGTYSASWGYDFWGQGTLVTVSS

SEQ ID NO: 910 - protein, 126 aa, synthetic construct
EVQLVESGGGVVQPGGSLRLSCAAPGDTFSENDIGWFRQTPGKEREFVAAIVWPGGETYYRDSVKGRFTLSRDNAKNTVYLQMNSLRPEDTALYSCAVKIFSKTGTYSASWEYVFWGQGTLVTVSS

SEQ ID NO: 911 - protein, 126 aa, synthetic construct
EVQLVESGGGVVQPGGSLRLSCAAPGDTFSENDIGWFRQTPGKEREFVAAIVWPGGETYYRDSVKGRFTLSRDNAKNTVYLQMNSLRPEDTALYSCAVKIFSKTGTYSAEWEYDFWGQGTLVTVSS

SEQ ID NO: 912 - protein, 126 aa, synthetic construct
EVQLVESGGGVVQPGGSLRLSCAAPGDTFSENDIGWFRQTPGKEREFVAAIVWPGGETYYRDSVKGRFTLSRDNAKNTVYLQMNSLRPEDTALYSCAVKIFSKTGTYSASQEYDFWGQGTLVTVSS

SEQ ID NO: 913 - protein, 126 aa, synthetic construct
EVQLVESGGGVVQPGGSLRLSCAAPGDTFSENDIGWFRQTPGKEREFVAAIVWPGGETYYRDSVKGRFTLSRDNAKNTVYLQMNSLRPEDTALYSCAVKIFSKTGTYSASFEYDFWGQGTLVTVSS

SEQ ID NO: 914 - protein, 126 aa, synthetic construct
EVQLVESGGGVVQPGGSLRLSCAAPGDTFSENDIGWFRQTPGKEREFVAAIVWPGGETYYRDSVKGRFTLSRDNAKNTVYLQMNSLRPEDTALYSCAVKIFSKTGTYSASHEYDFWGQGTLVTVSS

SEQ ID NO: 915 - protein, 126 aa, synthetic construct
EVQLVESGGGVVQPGGSLRLSCAAPGDTFSENDIGWFRQTPGKEREFVAAIVWPGGETYYRDSVKGRFTLSRDNAKNTVYLQMNSLRPEDTALYSCAVKIFSKTGTYSASDEYDFWGQGTLVTVSS

SEQ ID NO: 916 - protein, 126 aa, synthetic construct
EVQLVESGGGVVQPGGSLRLSCAAPGDTFSENDIGWFRQTPGKEREFVAAIVWPGGETYYRDSVKGRFTLSRDNAKNTVYLQMNSLRPEDTALYSCAVKIFSKTGTYSASSDYDFWGQGTLVTVSS

SEQ ID NO: 917 - protein, 126 aa, synthetic construct
EVQLVESGGGVVQPGGSLRLSCAAPGDTFSENDIGWFRQTPGKEREFVAAIVWPGGETYYRDSVKGRFTLSRDNAKNTVYLQMNSLRPEDTALYSCAVKIFSKTGTYSASPEYDFWGQGTLVTVSS

SEQ ID NO: 918 - protein, 126 aa, synthetic construct
EVQLVESGGGVVQPGGSLRLSCAAPGDTFSENDIGWFRQTPGKEREFVAAIVWPGGETYYRDSVKGRFTLSRDNAKNTVYLQMNSLRPEDTALYSCAVKIFSKTGTYSASKEYDFWGQGTLVTVSS

SEQ ID NO: 919 - protein, 126 aa, synthetic construct
EVQLVESGGGVVQPGGSLRLSCAAPGDTFSENDIGWFRQTPGKEREFVAAIVWPGGETYYRDSVKGRFTLSRDNAKNTVYLQMNSLRPEDTALYSCAVKIFSKTGTYSASIEYDFWGQGTLVTVSS

SEQ ID NO: 920 - protein, 126 aa, synthetic construct
EVQLVESGGGVVQPGGSLRLSCAAPGDTFSENDIGWFRQTPGKEREFVAAIVWPGGETYYRDSVKGRFTLSRDNAKNTVYLQMNSLRPEDTALYSCAVKIFSKTGTYSASWYYDFWGQGTLVTVSS

SEQ ID NO: 921 - protein, 126 aa, synthetic construct
EVQLVESGGGVVQPGGSLRLSCAAPGDTFSENDIGWFRQTPGKEREFVAAIVWPGGETYYRDSVKGRFTLSRDNAKNTVYLQMNSLRPEDTALYSCAVKIFSKTGTYSASTEYDFWGQGTLVTVSS

SEQ ID NO: 922 - protein, 126 aa, synthetic construct
EVQLVESGGGVVQPGGSLRLSCAAPGDTFSENDIGWFRQTPGKEREFVAAIVWPGGETYYRDSVKGRFTLSRDNAKNTVYLQMNSLRPEDTALYSCAVKIFSKTGTYSASEEYDFWGQGTLVTVSS

SEQ ID NO: 923 - protein, 126 aa, synthetic construct
EVQLVESGGGVVQPGGSLRLSCAAPGDTFSENDIGWFRQTPGKEREFVAAIVWPGGETYYRDSVKGRFTLSRDNAKNTVYLQMNSLRPEDTALYSCAVKIFSKTGTYSASGEYDFWGQGTLVTVSS

SEQ ID NO: 924 - protein, 126 aa, synthetic construct
EVQLVESGGGVVQPGGSLRLSCAAPGDTFSENDIGWFRQTPGKEREFVAAIVWPGGETYYRDSVKGRFTLSRDNAKNTVYLQMNSLRPEDTALYSCAVKIFSKTGTYSASREYDFWGQGTLVTVSS

SEQ ID NO: 925 - protein, 126 aa, synthetic construct
EVQLVESGGGVVQPGGSLRLSCAAPGDTFSENDIGWFRQTPGKEREFVAAIVWPGGETYYRDSVKGRFTLSRDNAKNTVYLQMNSLRPEDTALYSCAVKIFSKTGTYSASLEYDFWGQGTLVTVSS

SEQ ID NO: 926 - protein, 126 aa, synthetic construct
EVQLVESGGGVVQPGGSLRLSCAAPGDTFSENDIGWFRQTPGKEREFVAAIVWPGGETYYRDSVKGRFTLSRDNAKNTVYLQMNSLRPEDTALYSCAVKIFSKTGTYSASYEYDFWGQGTLVTVSS

SEQ ID NO: 927 - protein, 126 aa, synthetic construct
EVQLVESGGGVVQPGGSLRLSCAAPGDTFSENDIGWFRQTPGKEREFVAAIVWPGGETYYRDSVKGRFTLSRDNAKNTVYLQMNSLRPEDTALYSCAVKIFSKTGTYSASAEYDFWGQGTLVTVSS

SEQ ID NO: 928 - protein, 126 aa, synthetic construct
EVQLVESGGGVVQPGGSLRLSCAAPGDTFSENDIGWFRQTPGKEREFVAAIVWPGGETYYRDSVKGRFTLSRDNAKNTVYLQMNSLRPEDTALYSCAVKIFSKTGTYSASWEYDSWGQGTLVTVSS

SEQ ID NO: 929 - protein, 126 aa, synthetic construct
EVQLVESGGGVVQPGGSLRLSCAAPGDTFSENDIGWFRQAPGKEREFVAAIKWPGGETYYKDKVKGRFTLSRDNAKNTVYLQMNSLRPEDTALYYCAVKIFSKTGTYSASWEYDFWGQGTLVTVSS

SEQ ID NO: 930 - protein, 126 aa, synthetic construct
DVQLVESGGGVVQPGGSLRLSCAAPGDTFSENDIGWFRQAPGKEREFVAAIVWPGGETYYADSVKGRFTISRDNAKNTVYLQMNSLRPEDTALYYCAVKIFSKTGTYSASWEYDFWGQGTLVTVSS

SEQ ID NO: 931 - protein, 126 aa, synthetic construct
EVQLVESGGGVVQPGGSLRLSCAAPGDTFSQNDIGWFRQAPGKEREFVAAIKWPGGETYYRDAVKGRFTLSRDNAKNTVYLQMNSLRPEDTALYYCAVKIFSKTGTYSASWEYDFWGQGTLVTVSS

SEQ ID NO: 932 - protein, 126 aa, synthetic construct
EVQLVESGGGVVQPGGSLRLSCAAPGDTFSQNDIGWFRQAPGKEREFVAAIKWPGGETGYRDKVKGRFTLSRDNAKNTVYLQMNSLRPEDTALYYCAVKIFSKTGTYSASWEYDFWGQGTLVTVSS

SEQ ID NO: 933 - protein, 126 aa, synthetic construct
EVQLVESGGGVVQPGGSLRLSCAAPGDTFSENDIGWFRQAPGKEREFVAAIKWPGGETGYRDKVKGRFTLSRDNAKNTVYLQMNSLRPEDTALYYCAVKIFSKTGTYSASWEYDFWGQGTLVTVSS

SEQ ID NO: 934 - protein, 126 aa, synthetic construct
EVQLVESGGGVVQPGGSLRLSCAAPGDTFSQNDIGWFRQAPGKEREFVAAIKWPGAETGYRDKVKGRFTLSRDNAKNTVYLQMNSLRPEDTALYYCAVKIFSKTGTYSASWEYDFWGQGTLVTVSS

SEQ ID NO: 935 - protein, 126 aa, synthetic construct
EVQLVESGGGVVQPGGSLRLSCAAPGDTFSENDIGWFRQAPGKEREFVAAIKWPGAETGYRDKVKGRFTLSRDNAKNTVYLQMNSLRPEDTALYYCAVKIFSKTGTYSASWEYDFWGQGTLVTVSS

SEQ ID NO: 936 - protein, 126 aa, synthetic construct
EVQLVESGGGVVQPGGSLRLSCAAPGDTFSQNDIGWFRQAPGKEREFVAAIVWPGAETGYRDKVKGRFTLSRDNAKNTVYLQMNSLRPEDTALYYCAVKIFSKTGTYSASWEYDFWGQGTLVTVSS

SEQ ID NO: 937 - protein, 126 aa, synthetic construct
EVQLVESGGGVVQPGGSLRLSCAAPGDTFSQNDIGWFRQAPGKEREFVAAIKWPGGETGYKDKVKGRFTLSRDNAKNTVYLQMNSLRPEDTALYYCAVKIFSKTGTYSASWEYDFWGQGTLVTVSS

SEQ ID NO: 938 - protein, 126 aa, synthetic construct
EVQLVESGGGVVQPGGSLRLSCAAPGDTFSENDIGWFRQAPGKEREFVAAIVWPGAETGYRDKVKGRFTLSRDNAKNTVYLQMNSLRPEDTALYYCAVKIFSKTGTYSASWEYDFWGQGTLVTVSS

SEQ ID NO: 939 - protein, 126 aa, synthetic construct
EVQLVESGGGVVQPGGSLRLSCAAPGDTFSENDIGWFRQAPGKEREFVAAIVWPGGETGYRDKVKGRFTLSRDNAKNTVYLQMNSLRPEDTALYYCAVKIFSKTGTYSASWEYDFWGQGTLVTVSS

SEQ ID NO: 940 - protein, 126 aa, synthetic construct
EVQLVESGGGVVQPGGSLRLSCAAPGDTFSQNDIGWFRQAPGKEREFVAAIKWPGGETYYRDKVKGRFTLSRDNAKNTVYLQMNSLRPEDTALYYCAVKIFSKTGTYSASWEYDFWGQGTLVTVSS

SEQ ID NO: 941 - protein, 126 aa, synthetic construct
EVQLVESGGGVVQPGGSLRLSCAAPGDTFSENDIGWFRQAPGKEREFVAAIKWPGGETYYRDKVKGRFTLSRDNAKNTVYLQMNSLRPEDTALYYCAVKIFSKTGTYSASWEYDFWGQGTLVTVSS

SEQ ID NO: 942 - protein, 126 aa, synthetic construct
EVQLVESGGGVVQPGGSLRLSCAAPGDTFSQNDIGWFRQAPGKEREFVAAIKWPGAETYYRDKVKGRFTLSRDNAKNTVYLQMNSLRPEDTALYYCAVKIFSKTGTYSASWEYDFWGQGTLVTVSS

SEQ ID NO: 943 - protein, 126 aa, synthetic construct
EVQLVESGGGVVQPGGSLRLSCAAPGDTFSENDIGWFRQAPGKEREFVAAIKWPGAETYYRDKVKGRFTLSRDNAKNTVYLQMNSLRPEDTALYYCAVKIFSKTGTYSASWEYDFWGQGTLVTVSS

SEQ ID NO: 944 - protein, 126 aa, synthetic construct
EVQLVESGGGVVQPGGSLRLSCAAPGDTFSQNDIGWFRQAPGKEREFVAAIVWPGAETYYRDKVKGRFTLSRDNAKNTVYLQMNSLRPEDTALYYCAVKIFSKTGTYSASWEYDFWGQGTLVTVSS

SEQ ID NO: 945 - protein, 126 aa, synthetic construct
EVQLVESGGGVVQPGGSLRLSCAAPGDTFSENDIGWFRQAPGKEREFVAAIVWPGAETYYKDKVKGRFTLSRDNAKNTVYLQMNSLRPEDTALYYCAVKIFSKTGTYSASWEYDFWGQGTLVTVSS

SEQ ID NO: 946 - protein, 126 aa, synthetic construct
EVQLVESGGGVVQPGGSLRLSCAAPGDTFSENDIGWFRQAPGKEREFVAAIVWPGAETYYRDKVKGRFTLSRDNAKNTVYLQMNSLRPEDTALYYCAVKIFSKTGTYSASWEYDFWGQGTLVTVSS

SEQ ID NO: 947 - protein, 126 aa, synthetic construct
EVQLVESGGGVVQPGGSLRLSCAAPGDTFSENDIGWFRQTPGKEREFVAAIVWPGGETYYRDSVKGRFTLSRDNAKNTVYLQMNSLRPEDTALYSCAVKIFSKTGTYSASWEFDFWGQGTLVTVSS

SEQ ID NO: 948 - protein, 126 aa, synthetic construct
EVQLVESGGGVVQPGGSLRLSCAAPGDTFSENDIGWFRQAPGKEREFVAAIVWPGAETGYKDKVKGRFTLSRDNAKNTVYLQMNSLRPEDTALYYCAVKIFSKTGTYSASWEYDFWGQGTLVTVSS

SEQ ID NO: 949 - protein, 126 aa, synthetic construct
EVQLVESGGGVVQPGGSLRLSCAAPGDTFSENDIGWFRQTPGKEREFVAAIVWPGGETYYRDSVKGRFTLSRDNAKNTVYLQMNSLRPEDTALYSCAVKIFSKTGTYSASWQYDFWGQGTLVTVSS

SEQ ID NO: 950 - protein, 126 aa, synthetic construct
EVQLVESGGGVVQPGGSLRLSCAAPGDTFSENDIGWFRQAPGKEREFVAAIKWPGGETYYRDAVKGRFTLSRDNAKNTVYLQMNSLRPEDTALYYCAVKIFSKTGTYSASWEYDFWGQGTLVTVSS

SEQ ID NO: 951 - protein, 126 aa, synthetic construct
EVQLVESGGGVVQPGGSLRLSCAAPGDTFSQNDIGWFRQAPGKEREFVAAIVWPGGETYYRDAVKGRFTLSRDNAKNTVYLQMNSLRPEDTALYYCAVKIFSKTGTYSASWEYDFWGQGTLVTVSS

SEQ ID NO: 952 - protein, 126 aa, synthetic construct
EVQLVESGGGVVQPGGSLRLSCAAPGDTFSQNDIGWFRQAPGKEREFVAAIKWPGAETGYKDKVKGRFTLSRDNAKNTVYLQMNSLRPEDTALYYCAVKIFSKTGTYSASWEYDFWGQGTLVTVSS

SEQ ID NO: 953 - protein, 126 aa, synthetic construct
EVQLVESGGGVVQPGGSLRLSCAAPGDTFSENDIGWFRQAPGKEREFVAAIKWPGAETGYKDKVKGRFTLSRDNAKNTVYLQMNSLRPEDTALYYCAVKIFSKTGTYSASWEYDFWGQGTLVTVSS

SEQ ID NO: 954 - protein, 126 aa, synthetic construct
EVQLVESGGGVVQPGGSLRLSCAAPGDTFSQNDIGWFRQAPGKEREFVAAIVWPGAETGYKDKVKGRFTLSRDNAKNTVYLQMNSLRPEDTALYYCAVKIFSKTGTYSASWEYDFWGQGTLVTVSS

SEQ ID NO: 955 - protein, 126 aa, synthetic construct
EVQLVESGGGVVQPGGSLRLSCAAPGDTFSQNDIGWFRQAPGKEREFVAAIVWPGGETGYRDKVKGRFTLSRDNAKNTVYLQMNSLRPEDTALYYCAVKIFSKTGTYSASWEYDFWGQGTLVTVSS

SEQ ID NO: 956 - protein, 126 aa, synthetic construct
EVQLVESGGGVVQPGGSLRLSCAAPGDTFSQNDIGWFRQAPGKEREFVAAIVWPGGETYYRDKVKGRFTLSRDNAKNTVYLQMNSLRPEDTALYYCAVKIFSKTGTYSASWEYDFWGQGTLVTVSS

SEQ ID NO: 957 - protein, 126 aa, synthetic construct
EVQLVESGGGVVQPGGSLRLSCAAPGDTFSENDIGWFRQAPGKEREFVAAIKWPGGETGYKDKVKGRFTLSRDNAKNTVYLQMNSLRPEDTALYYCAVKIFSKTGTYSASWEYDFWGQGTLVTVSS

SEQ ID NO: 958 - protein, 126 aa, synthetic construct
EVQLVESGGGVVQPGGSLRLSCAAPGDTFSQNDIGWFRQAPGKEREFVAAIVWPGGETGYKDKVKGRFTLSRDNAKNTVYLQMNSLRPEDTALYYCAVKIFSKTGTYSASWEYDFWGQGTLVTVSS

SEQ ID NO: 959 - protein, 126 aa, synthetic construct
EVQLVESGGGVVQPGGSLRLSCAAPGDTFSENDIGWFRQAPGKEREFVAAIVWPGGETGYKDKVKGRFTLSRDNAKNTVYLQMNSLRPEDTALYYCAVKIFSKTGTYSASWEYDFWGQGTLVTVSS

SEQ ID NO: 960 - protein, 126 aa, synthetic construct
EVQLVESGGGVVQPGGSLRLSCAAPGDTFSQNDIGWFRQAPGKEREFVAAIKWPGAETYYKDKVKGRFTLSRDNAKNTVYLQMNSLRPEDTALYYCAVKIFSKTGTYSASWEYDFWGQGTLVTVSS

SEQ ID NO: 961 - protein, 126 aa, synthetic construct
EVQLVESGGGVVQPGGSLRLSCAAPGDTFSENDIGWFRQAPGKEREFVAAIKWPGAETYYKDKVKGRFTLSRDNAKNTVYLQMNSLRPEDTALYYCAVKIFSKTGTYSASWEYDFWGQGTLVTVSS

SEQ ID NO: 962 - protein, 126 aa, synthetic construct
EVQLVESGGGVVQPGGSLRLSCAAPGDTFSQNDIGWFRQAPGKEREFVAAIVWPGAETYYKDKVKGRFTLSRDNAKNTVYLQMNSLRPEDTALYYCAVKIFSKTGTYSASWEYDFWGQGTLVTVSS

SEQ ID NO: 963 - protein, 126 aa, synthetic construct
EVQLVESGGGVVQPGGSLRLSCAAPGDTFSQNDIGWFRQAPGKEREFVAAIKWPGGETYYKDKVKGRFTLSRDNAKNTVYLQMNSLRPEDTALYYCAVKIFSKTGTYSASWEYDFWGQGTLVTVSS

SEQ ID NO: 964 - protein, 126 aa, synthetic construct
EVQLVESGGGVVQPGGSLRLSCAAPGDTFSQNDIGWFRQAPGKEREFVAAIVWPGGETYYKDKVKGRFTLSRDNAKNTVYLQMNSLRPEDTALYYCAVKIFSKTGTYSASWEYDFWGQGTLVTVSS

SEQ ID NO: 965 - protein, 126 aa, synthetic construct
EVQLVESGGGVVQPGGSLRLSCAAPGDTFSENDIGWFRQAPGKEREFVAAIVWPGGETYYRDAVKGRFTLSRDNAKNTVYLQMNSLRPEDTALYYCAVKIFSKTGTYSASWEYDFWGQGTLVTVSS

SEQ ID NO: 966 - protein, 126 aa, synthetic construct
EVQLVESGGGVVQPGGSLRLSCAAPGDTFSENDIGWFRQAPGKEREFVAAIVWPGGETYYRDKVKGRFTLSRDNAKNTVYLQMNSLRPEDTALYYCAVKIFSKTGTYSASWEYDFWGQGTLVTVSS

SEQ ID NO: 967 - protein, 126 aa, synthetic construct
EVQLVESGGGVVQPGGSLRLSCAAPGDTFSENDIGWFRQTPGKEREFVAAIVWPGGETYYRDSVKGRFTLSRDNAKNTVYLQMNSLRPEDTALYSCAVKIFSKTGTYSASWEYDTWGQGTLVTVSS

SEQ ID NO: 968 - protein, 126 aa, synthetic construct
EVQLVESGGGVVQPGGSLRLSCAAPGDTFSENDIGWFRQTPGKEREFVAAIVWPGGETYYRDSVKGRFTLSRDNAKNTVYLQMNSLRPEDTALYSCAVKIFSKTGTYSASWEYDYWGQGTLVTVSS

SEQ ID NO: 969 - protein, 126 aa, synthetic construct
EVQLVESGGGVVQPGGSLRLSCAAPGDTFSENDIGWFRQTPGKEREFVAAIVWPGGETYYRDSVKGRFTLSRDNAKNTVYLQMNSLRPEDTALYSCAVKIFSKTGTYSASWEYDKWGQGTLVTVSS

SEQ ID NO: 970 - protein, 126 aa, synthetic construct
EVQLVESGGGVVQPGGSLRLSCAAPGDTFSENDIGWFRQTPGKEREFVAAIVWPGGETYYRDSVKGRFTLSRDNAKNTVYLQMNSLRPEDTALYSCAVKIFSKTGTYSASWEYDRWGQGTLVTVSS

SEQ ID NO: 971 - protein, 126 aa, synthetic construct
EVQLVESGGGVVQPGGSLRLSCAAPGDTFSENDIGWFRQTPGKEREFVAAIVWPGGETYYRDSVKGRFTLSRDNAKNTVYLQMNSLRPEDTALYSCAVKIFSKTGTYSASWEYDAWGQGTLVTVSS

SEQ ID NO: 972 - protein, 126 aa, synthetic construct
EVQLVESGGGVVQPGGSLRLSCAAPGDTFSENDIGWFRQTPGKEREFVAAIVWPGGETYYRDSVKGRFTLSRDNAKNTVYLQMNSLRPEDTALYSCAVKIFSKTGTYSASWEYDHWGQGTLVTVSS

SEQ ID NO: 973 - protein, 126 aa, synthetic construct
EVQLVESGGGVVQPGGSLRLSCAAPGDTFSENDIGWFRQTPGKEREFVAAIVWPGGETYYRDSVKGRFTLSRDNAKNTVYLQMNSLRPEDTALYSCAVKIFSKTGTYSASWEYDGWGQGTLVTVSS

SEQ ID NO: 974 - protein, 126 aa, synthetic construct
EVQLVESGGGVVQPGGSLRLSCAAPGDTFSENDIGWFRQTPGKEREFVAAIVWPGGETYYRDSVKGRFTLSRDNAKNTVYLQMNSLRPEDTALYSCAVKIFSKTGTYSASWEYDIWGQGTLVTVSS

SEQ ID NO: 975 - protein, 126 aa, synthetic construct
EVQLVESGGGVVQPGGSLRLSCAAPGDTFSENDIGWFRQAPGKEREFVAAIVWPGGETYYADVVKGRFTISRDNAKNTVYLQMNSLRPEDTALYYCAVKIFSKTGTYSASWEYDFWGQGTLVTVSS

SEQ ID NO: 976 - protein, 126 aa, synthetic construct
EVQLVESGGGVVQPGGSLRLSCAAPGDTFSENDIGWFRQTPGKEREFVAAIVWPGGETYYRDSVKGRFTLSRDNAKNTVYLQMNSLRPEDTALYSCAVKIFSKTGTYSASWEYDVWGQGTLVTVSS

SEQ ID NO: 977 - protein, 126 aa, synthetic construct
EVQLVESGGGVVQPGGSLRLSCAAPGDTFSENDIGWFRQTPGKEREFVAAIVWPGGETYYRDSVKGRFTLSRDNAKNTVYLQMNSLRPEDTALYSCAVKIFSKTGTYSASWEYDDWGQGTLVTVSS

SEQ ID NO: 978 - protein, 126 aa, synthetic construct
EVQLVESGGGVVQPGGSLRLSCAAPGDTFSENDIGWFRQTPGKEREFVAAIVWPGGETYYRDSVKGRFTLSRDNAKNTVYLQMNSLRPEDTALYSCAVKIFSKTGTYSASWEYKFWGQGTLVTVSS

SEQ ID NO: 979 - protein, 126 aa, synthetic construct
EVQLVESGGGVVQPGGSLRLSCAAPGDTFSENDIGWFRQTPGKEREFVAAIVWPGGETYYRDSVKGRFTLSRDNAKNTVYLQMNSLRPEDTALYSCAVKIFSKTGTYSASWEYDQWGQGTLVTVSS

SEQ ID NO: 980 - protein, 126 aa, synthetic construct
EVQLVESGGGVVQPGGSLRLSCAAPGDTFSENDIGWFRQTPGKEREFVAAIVWPGGETYYRDSVKGRFTLSRDNAKNTVYLQMNSLRPEDTALYSCAVKIFSKTGTYSASWEYDPWGQGTLVTVSS

SEQ ID NO: 981 - protein, 126 aa, synthetic construct
EVQLVESGGGVVQPGGSLRLSCAAPGDTFSENDIGWFRQTPGKEREFVAAIVWPGGETYYRDSVKGRFTLSRDNAKNTVYLQMNSLRPEDTSLYSCAVKIFSKTGTYSASWEYDQWGQGTLVTVSS

SEQ ID NO: 982 - protein, 126 aa, synthetic construct
EVQLVESGGGVVQPGGSLRLSCAAPGDTFSENDIGWFRQAPGKEREFVAAIKWPGAETYYKDAVKGRFTLSRDNAKNTVYLQMNSLRPEDTALYYCAVKIFSTTGTYSASWEYDFWGQGTLVTVSS

SEQ ID NO: 983 - protein, 126 aa, synthetic construct
EVQLVESGGGVVQPGGSLRLSCAAPGDTFSENDIGWFRQAPGKEREFVAAIVWPGGETYYADIVKGRFTISRDNAKNTVYLQMNSLRPEDTALYYCAVKIFSKTGTYSASWEYDFWGQGTLVTVSS

SEQ ID NO: 984 - protein, 126 aa, synthetic construct
EVQLVESGGGVVQPGGSLRLSCAAPGDTFSQNDIGWFRQAPGKEREFVAAIVWPGAETYYRDAVKGRFTLSRDNAKNTVYLQMNSLRPEDTALYYCAVKIFSKTGTYSASWEYDFWGQGTLVTVSS

SEQ ID NO: 985 - protein, 126 aa, synthetic construct
EVQLVESGGGVVQPGGSLRLSCAAPGDTFSENDIGWFRQTPGKEREFVAAIVWPGGETYYRDSVKGRFTLSRDNAKNTVYLQMNSLRPEDTALYSCAVKIFSKTGTYSASWEYDEWGQGTLVTVSS

SEQ ID NO: 986 - protein, 126 aa, synthetic construct
EVQLVESGGGVVQPGGSLRLSCAAPGDTFSENDIGWFRQAPGKEREFVAAIVWPGGETYYADHVKGRFTISRDNAKNTVYLQMNSLRPEDTALYYCAVKIFSKTGTYSASWEYDFWGQGTLVTVSS

SEQ ID NO: 987 - protein, 126 aa, synthetic construct
EVQLVESGGGVVQPGGSLRLSCAAPGDTFSENDIGWFRQAPGKEREFVAAIVWPGGETYYADTVKGRFTISRDNAKNTVYLQMNSLRPEDTALYYCAVKIFSKTGTYSASWEYDFWGQGTLVTVSS

SEQ ID NO: 988 - protein, 126 aa, synthetic construct
EVQLVESGGGVVQPGGSLRLSCAAPGDTFSENDIGWFRQAPGKEREFVAAIVWPGGETYYADRVKGRFTISRDNAKNTVYLQMNSLRPEDTALYYCAVKIFSKTGTYSASWEYDFWGQGTLVTVSS

SEQ ID NO: 989 - protein, 126 aa, synthetic construct
EVQLVESGGGVVQPGGSLRLSCAAPGDTFSENDIGWFRQAPGKEREFVAAIVWPGGETYYADQVKGRFTISRDNAKNTVYLQMNSLRPEDTALYYCAVKIFSKTGTYSASWEYDFWGQGTLVTVSS

SEQ ID NO: 990 - protein, 126 aa, synthetic construct
EVQLVESGGGVVQPGGSLRLSCAAPGDTFSENDIGWFRQAPGKEREFVAAIVWPGGETYYADPVKGRFTISRDNAKNTVYLQMNSLRPEDTALYYCAVKIFSKTGTYSASWEYDFWGQGTLVTVSS

SEQ ID NO: 991 - protein, 126 aa, synthetic construct
EVQLVESGGGVVQPGGSLRLSCAAPGDTFSENDIGWFRQAPGKEREFVAAIVWPGGETYYADLVKGRFTISRDNAKNTVYLQMNSLRPEDTALYYCAVKIFSKTGTYSASWEYDFWGQGTLVTVSS

SEQ ID NO: 992 - protein, 126 aa, synthetic construct
EVQLVESGGGVVQPGGSLRLSCAAPGDTFSENDIGWFRQAPGKEREFVAAIVWPGGETYYADKVKGRFTISRDNAKNTVYLQMNSLRPEDTALYYCAVKIFSKTGTYSASWEYDFWGQGTLVTVSS

SEQ ID NO: 993 - protein, 126 aa, synthetic construct
EVQLVESGGGVVQPGGSLRLSCAAPGDTFSENDIGWFRQAPGKEREFVAAIVWPGGETYYADYVKGRFTISRDNAKNTVYLQMNSLRPEDTALYYCAVKIFSKTGTYSASWEYDFWGQGTLVTVSS

SEQ ID NO: 994 - protein, 126 aa, synthetic construct
EVQLVESGGGVVQPGGSLRLSCAAPGDTFSENDIGWFRQTPGKEREFVAAIVWPGGETYYRDSVKGRFTLSRDNAKNTVYLQMNSLRPEDTALYSCAVKIFSKTGTYSASWEYDLWGQGTLVTVSS

SEQ ID NO: 995 - protein, 126 aa, synthetic construct
EVQLVESGGGVVQPGGSLRLSCAAPGDTFSENDIGWFRQAPGKEREFVAAIVWPGGETYYADGVKGRFTISRDNAKNTVYLQMNSLRPEDTALYYCAVKIFSKTGTYSASWEYDFWGQGTLVTVSS

SEQ ID NO: 996 - protein, 126 aa, synthetic construct
EVQLVESGGGVVQPGGSLRLSCAAPGDTFSENDIGWFRQAPGKEREFVAAIVWPGGETYYADFVKGRFTISRDNAKNTVYLQMNSLRPEDTALYYCAVKIFSKTGTYSASWEYDFWGQGTLVTVSS

SEQ ID NO: 997 - protein, 126 aa, synthetic construct
EVQLVESGGGVVQPGGSLRLSCAAPGDTFSENDIGWFRQAPGKEREFVAAIVWPGGETYYADEVKGRFTISRDNAKNTVYLQMNSLRPEDTALYYCAVKIFSKTGTYSASWEYDFWGQGTLVTVSS

SEQ ID NO: 998 - protein, 126 aa, synthetic construct
EVQLVESGGGVVQPGGSLRLSCAAPGDTFSENDIGWFRQAPGKEREFVAAIVWPGGETYYADDVKGRFTISRDNAKNTVYLQMNSLRPEDTALYYCAVKIFSKTGTYSASWEYDFWGQGTLVTVSS

SEQ ID NO: 999 - protein, 126 aa, synthetic construct
EVQLVESGGGVVQPGGSLRLSCAAPGDTFSENDIGWFRQAPGKEREFVAAIVWPGGETYYADAVKGRFTISRDNAKNTVYLQMNSLRPEDTALYYCAVKIFSKTGTYSASWEYDFWGQGTLVTVSS

SEQ ID NO: 1000 - protein, 126 aa, synthetic construct
EVQLVESGGGVVQPGGSLRLSCAAPGDTFSENDIGWFRQAPGKEREFVAAIVWPGAETYYRDAVKGRFTLSRDNAKNTVYLQMNSLRPEDTALYYCAVKIFSKTGTYSASWEYDFWGQGTLVTVSS

SEQ ID NO: 1001 - protein, 126 aa, synthetic construct
EVQLVESGGGVVQPGGSLRLSCAAPGDTFSENDIGWFRQTPGKEREFVAAIVWPGGETYYRDSVKGRFTLSRDNAKNTVYLQMNSLRPEDTALYSCAVKDFSKTGTYSASWEYDFWGQGTLVTVSS

SEQ ID NO: 1002 - protein, 126 aa, synthetic construct
EVQLVESGGGVVQPGGSLRLSCAAPGDTFSENDIGWFRQAPGKEREFVAAIVWPGGETGYKDAVKGRFTLSRDNAKNTVYLQMNSLRPEDTALYYCAVKIFSTTGTYSASWEYDFWGQGTLVTVSS

SEQ ID NO: 1003 - protein, 126 aa, synthetic construct
EVQLVESGGGVVQPGGSLRLSCAAPGDTFSENDIGWFRQAPGKEREFVAAIKWPGAETYYRDAVKGRFTLSRDNAKNTVYLQMNSLRPEDTALYYCAQKIFSTTGTYSASWEYDFWGQGTLVTVSS

SEQ ID NO: 1004 - protein, 126 aa, synthetic construct
EVQLVESGGGVVQPGGSLRLSCAAPGDTFSENDIGWFRQAPGKEREFVAAIVWPGGETYYRDAVKGRFTLSRDNAKNTVYLQMNSLRPEDTALYYCAQKIFSTTGTYSASWEYDFWGQGTLVTVSS

SEQ ID NO: 1005 - protein, 126 aa, synthetic construct
EVQLVESGGGVVQPGGSLRLSCAAPGDTFSQNDIGWFRQAPGKEREFVAAIKWPGAETYYKDKVKGRFTLSRDNAKNTVYLQMNSLRPEDTALYYCAQKIFSTTGTYSASWEYDFWGQGTLVTVSS

SEQ ID NO: 1006 - protein, 126 aa, synthetic construct
EVQLVESGGGVVQPGGSLRLSCAAPGDTFSENDIGWFRQAPGKEREFVAAIVWPGAETYYKDKVKGRFTLSRDNAKNTVYLQMNSLRPEDTALYYCAQKIFSTTGTYSASWEYDFWGQGTLVTVSS

SEQ ID NO: 1007 - protein, 126 aa, synthetic construct
EVQLVESGGGVVQPGGSLRLSCAAPGDTFSENDIGWFRQAPGKEREFVAAIVWPGGETGYRDKVKGRFTLSRDNAKNTVYLQMNSLRPEDTALYYCAQKIFSTTGTYSASWEYDFWGQGTLVTVSS

SEQ ID NO: 1008 - protein, 126 aa, synthetic construct
EVQLVESGGGVVQPGGSLRLSCAAPGDTFSENDIGWFRQAPGKEREFVAAIVWPGAETGYKDKVKGRFTLSRDNAKNTVYLQMNSLRPEDTALYYCAVKIFSRTGTYSASWEYDFWGQGTLVTVSS

SEQ ID NO: 1009 - protein, 126 aa, synthetic construct
EVQLVESGGGVVQPGGSLRLSCAAPGDTFSENDIGWFRQAPGKEREFVAAIVWPGAETGYKDAVKGRFTLSRDNAKNTVYLQMNSLRPEDTALYYCAVKIFSTTGTYSASWEYDFWGQGTLVTVSS

SEQ ID NO: 1010 - protein, 126 aa, synthetic construct
EVQLVESGGGVVQPGGSLRLSCAAPGDTFSENDIGWFRQAPGKEREFVAAIVWPGAETYYRDAVKGRFTLSRDNAKNTVYLQMNSLRPEDTALYYCAVKIFSTTGTYSASWEYDFWGQGTLVTVSS

SEQ ID NO: 1011 - protein, 126 aa, synthetic construct
EVQLVESGGGVVQPGGSLRLSCAAPGDTFSQNDIGWFRQAPGKEREFVAAIKWPGAETGYKDAVKGRFTLSRDNAKNTVYLQMNSLRPEDTALYYCAQKIFSRTGTYSASWEYDFWGQGTLVTVSS

SEQ ID NO: 1012 - protein, 126 aa, synthetic construct
EVQLVESGGGVVQPGGSLRLSCAAPGDTFSENDIGWFRQAPGKEREFVAAIKWPGAETGYKDAVKGRFTLSRDNAKNTVYLQMNSLRPEDTALYYCAQKIFSRTGTYSASWEYDFWGQGTLVTVSS

SEQ ID NO: 1013 - protein, 126 aa, synthetic construct
EVQLVESGGGVVQPGGSLRLSCAAPGDTFSQNDIGWFRQAPGKEREFVAAIVWPGAETGYKDAVKGRFTLSRDNAKNTVYLQMNSLRPEDTALYYCAQKIFSRTGTYSASWEYDFWGQGTLVTVSS

SEQ ID NO: 1014 - protein, 126 aa, synthetic construct
EVQLVESGGGVVQPGGSLRLSCAAPGDTFSENDIGWFRQAPGKEREFVAAIVWPGAETGYKDAVKGRFTLSRDNAKNTVYLQMNSLRPEDTALYYCAQKIFSRTGTYSASWEYDFWGQGTLVTVSS

SEQ ID NO: 1015 - protein, 126 aa, synthetic construct
EVQLVESGGGVVQPGGSLRLSCAAPGDTFSQNDIGWFRQAPGKEREFVAAIKWPGGETGYKDAVKGRFTLSRDNAKNTVYLQMNSLRPEDTALYYCAQKIFSRTGTYSASWEYDFWGQGTLVTVSS

SEQ ID NO: 1016 - protein, 126 aa, synthetic construct
EVQLVESGGGVVQPGGSLRLSCAAPGDTFSENDIGWFRQAPGKEREFVAAIVWPGGETYYKDAVKGRFTLSRDNAKNTVYLQMNSLRPEDTALYYCAVKIFSTTGTYSASWEYDFWGQGTLVTVSS

SEQ ID NO: 1017 - protein, 126 aa, synthetic construct
EVQLVESGGGVVQPGGSLRLSCAAPGDTFSENDIGWFRQAPGKEREFVAAIKWPGGETGYKDAVKGRFTLSRDNAKNTVYLQMNSLRPEDTALYYCAQKIFSRTGTYSASWEYDFWGQGTLVTVSS

SEQ ID NO: 1018 - protein, 126 aa, synthetic construct
EVQLVESGGGVVQPGGSLRLSCAAPGDTFSENDIGWFRQAPGKEREFVAAIYWPGGETYYRDKVKGRFTLSRDNAKNTVDLQMNSLRPEDTALYYCAVKIFSKTGEYSASWEYDFWGQGTLVTVSS

SEQ ID NO: 1019 - protein, 126 aa, synthetic construct
EVQLVESGGGVVQPGGSLRLSCAAPGDTFSENDIGWFRQAPGKEREFVAAIFWPGGETYYRDKVKGRFTLSRDNAKNTVDLQMNSLRPEDTALYYCALKIESKTGTYSASWEYDFWGQGTLVTVSS

SEQ ID NO: 1020 - protein, 126 aa, synthetic construct
EVQLVESGGGVVQPGGSLRLSCAAPGDTFSQNDIGWFRQAPGKEREFVAAIKWPGAETYYKDAVKGRFTLSRDNAKNTVYLQMNSLRPEDTALYYCAQKIFSRTGTYSASWEYDFWGQGTLVTVSS

SEQ ID NO: 1021 - protein, 126 aa, synthetic construct
EVQLVESGGGVVQPGGSLRLSCAAPGDTFSENDIGWFRQAPGKEREFVAGIVWPGGETYYRDKVKGRFTLSRDNAKNTVDLQMNSLRPEDTALYYCAVKIFSKTGEYSASWEYDFWGQGTLVTVSS

SEQ ID NO: 1022 - protein, 126 aa, synthetic construct
EVQLVESGGGVVQPGGSLRLSCAAPGDTFSENDIGWFRQAPGKEREFVAAIYWPGGETYYRDKVKGRFTLSRDNAKNTVSLQMNSLRPEDTALYYCALKIESKTGTYSASWEYDFWGQGTLVTVSS

SEQ ID NO: 1023 - protein, 126 aa, synthetic construct
EVQLVESGGGVVQPGGSLRLSCAAPGDTFSENDIGWFRQAPGKEREFVAAIFWPGGETYYRDKVKGRFTLSRDNAKNTVSLQMNSLRPEDTALYYCALKIESKTGTYSASWEYDFWGQGTLVTVSS

SEQ ID NO: 1024 - protein, 126 aa, synthetic construct
EVQLVESGGGVVQPGGSLRLSCAAPGDTFSENDIGWFRQAPGKEREFVAGIVWPGGETYYRDKVKGRFTLSRDNAKNTVSLQMNSLRPEDTALYYCALKIESKTGTYSASWEYDFWGQGTLVTVSS

SEQ ID NO: 1025 - protein, 126 aa, synthetic construct
EVQLVESGGGVVQPGGSLRLSCAAPGDTFSENDIGWFRQAPGKEREFVAAIYWPGGETYYRDKVKGRFTLSRDNAKNTVDLQMNSLRPEDTALYYCALKIESKTGTYSASWEYDFWGQGTLVTVSS

SEQ ID NO: 1026 - protein, 126 aa, synthetic construct
EVQLVESGGGVVQPGGSLRLSCAAPGDTFSENDIGWFRQAPGKEREFVAAIKWPGAETYYKDAVKGRFTLSRDNAKNTVYLQMNSLRPEDTALYYCAVKIFSRTGTYSASWEYDFWGQGTLVTVSS

SEQ ID NO: 1027 - protein, 126 aa, synthetic construct
EVQLVESGGGVVQPGGSLRLSCAAPGDTFSQNDIGWFRQAPGKEREFVAAIKWPGGETGYRDAVKGRFTLSRDNAKNTVYLQMNSLRPEDTALYYCAVKIFSRTGTYSASWEYDFWGQGTLVTVSS

SEQ ID NO: 1028 - protein, 126 aa, synthetic construct
EVQLVESGGGVVQPGGSLRLSCAAPGDTFSQNDIGWFRQAPGKEREFVAAIVWPGGETGYKDAVKGRFTLSRDNAKNTVYLQMNSLRPEDTALYYCAQKIFSRTGTYSASWEYDFWGQGTLVTVSS

SEQ ID NO: 1029 - protein, 126 aa, synthetic construct
EVQLVESGGGVVQPGGSLRLSCAAPGDTFSENDIGWFRQAPGKEREFVAAIFWPGGETYYRDKVKGRFTLSRDNAKNTVSLQMNSLRPEDTALYYCAVKIESKTGTYSASWEYDFWGQGTLVTVSS

SEQ ID NO: 1030 - protein, 126 aa, synthetic construct
EVQLVESGGGVVQPGGSLRLSCAAPGDTFSENDIGWFRQAPGKEREFVAGIVWPGGETYYRDKVKGRFTLSRDNAKNTVSLQMNSLRPEDTALYYCAVKIESKTGTYSASWEYDFWGQGTLVTVSS

SEQ ID NO: 1031 - protein, 126 aa, synthetic construct
EVQLVESGGGVVQPGGSLRLSCAAPGDTFSENDIGWFRQAPGKEREFVAAIYWPGGETYYRDKVKGRFTLSRDNAKNTVDLQMNSLRPEDTALYYCAVKIESKTGTYSASWEYDFWGQGTLVTVSS

SEQ ID NO: 1032 - protein, 126 aa, synthetic construct
EVQLVESGGGVVQPGGSLRLSCAAPGDTFSENDIGWFRQAPGKEREFVAAIFWPGGETYYRDKVKGRFTLSRDNAKNTVDLQMNSLRPEDTALYYCAVKIESKTGTYSASWEYDFWGQGTLVTVSS

SEQ ID NO: 1033 - protein, 126 aa, synthetic construct
EVQLVESGGGVVQPGGSLRLSCAAPGDTFSENDIGWFRQAPGKEREFVAGIVWPGGETYYRDKVKGRFTLSRDNAKNTVDLQMNSLRPEDTALYYCAVKIESKTGTYSASWEYDFWGQGTLVTVSS

SEQ ID NO: 1034 - protein, 126 aa, synthetic construct
EVQLVESGGGVVQPGGSLRLSCAAPGDTFSENDIGWFRQAPGKEREFVAGIVWPGGETYYRDKVKGRFTLSRDNAKNTVDLQMNSLRPEDTALYYCALKIESKTGTYSASWEYDFWGQGTLVTVSS

SEQ ID NO: 1035 - protein, 126 aa, synthetic construct
EVQLVESGGGVVQPGGSLRLSCAAPGDTFSQNDIGWFRQAPGKEREFVAAIKWPGGETGYKDAVKGRFTLSRDNAKNTVYLQMNSLRPEDTALYYCAVKIFSRTGTYSASWEYDFWGQGTLVTVSS

SEQ ID NO: 1036 - protein, 126 aa, synthetic construct
EVQLVESGGGVVQPGGSLRLSCAAPGDTFSENDIGWFRQAPGKEREFVAAIFWPGGETYYRDKVKGRFTLSRDNAKNTVDLQMNSLRPEDTALYYCAVKIFSKTGEYSASWEYDFWGQGTLVTVSS

SEQ ID NO: 1037 - protein, 126 aa, synthetic construct
EVQLVESGGGVVQPGGSLRLSCAAPGDTFSENDIGWFRQAPGKEREFVAAIYWPGGETYYRDKVKGRFTLSRDNAKNTVSLQMNSLRPEDTALYYCAVKIESKTGTYSASWEYDFWGQGTLVTVSS

SEQ ID NO: 1038 - protein, 126 aa, synthetic construct
EVQLVESGGGVVQPGGSLRLSCAAPGDTFSENDIGWFRQAPGKEREFVAAIVWPGGETYYKDAVKGRFTLSRDNAKNTVYLQMNSLRPEDTALYYCAQKIFSRTGTYSASWEYDFWGQGTLVTVSS

SEQ ID NO: 1039 - protein, 126 aa, synthetic construct
EVQLVESGGGVVQPGGSLRLSCAAPGDTFSENDIGWFRQAPGKEREFVAAIKWPGAETGYRDAVKGRFTLSRDNAKNTVYLQMNSLRPEDTALYYCAQKIFSRTGTYSASWEYDFWGQGTLVTVSS

SEQ ID NO: 1040 - protein, 126 aa, synthetic construct
EVQLVESGGGVVQPGGSLRLSCAAPGDTFSENDIGWFRQAPGKEREFVAAIKWPGGETYYRDAVKGRFTLSRDNAKNTVYLQMNSLRPEDTALYYCAQKIFSRTGTYSASWEYDFWGQGTLVTVSS

SEQ ID NO: 1041 - protein, 126 aa, synthetic construct
EVQLVESGGGVVQPGGSLRLSCAAPGDTFSQNDIGWFRQAPGKEREFVAAIVWPGGETYYRDAVKGRFTLSRDNAKNTVYLQMNSLRPEDTALYYCAQKIFSRTGTYSASWEYDFWGQGTLVTVSS

SEQ ID NO: 1042 - protein, 126 aa, synthetic construct
EVQLVESGGGVVQPGGSLRLSCAAPGDTFSENDIGWFRQAPGKEREFVAAIVWPGGETYYRDAVKGRFTLSRDNAKNTVYLQMNSLRPEDTALYYCAQKIFSRTGTYSASWEYDFWGQGTLVTVSS

SEQ ID NO: 1043 - protein, 126 aa, synthetic construct
EVQLVESGGGVVQPGGSLRLSCAAPGDTFSQNDIGWFRQAPGKEREFVAAIKWPGAETGYKDKVKGRFTLSRDNAKNTVYLQMNSLRPEDTALYYCAQKIFSRTGTYSASWEYDFWGQGTLVTVSS

SEQ ID NO: 1044 - protein, 126 aa, synthetic construct
EVQLVESGGGVVQPGGSLRLSCAAPGDTFSQNDIGWFRQAPGKEREFVAAIVWPGAETYYRDAVKGRFTLSRDNAKNTVYLQMNSLRPEDTALYYCAQKIFSRTGTYSASWEYDFWGQGTLVTVSS

SEQ ID NO: 1045 - protein, 126 aa, synthetic construct
EVQLVESGGGVVQPGGSLRLSCAAPGDTFSENDIGWFRQAPGKEREFVAAIKWPGAETGYKDKVKGRFTLSRDNAKNTVYLQMNSLRPEDTALYYCAQKIFSRTGTYSASWEYDFWGQGTLVTVSS

SEQ ID NO: 1046 - protein, 126 aa, synthetic construct
EVQLVESGGGVVQPGGSLRLSCAAPGDTFSENDIGWFRQAPGKEREFVAAIVWPGAETGYKDKVKGRFTLSRDNAKNTVYLQMNSLRPEDTALYYCAQKIFSRTGTYSASWEYDFWGQGTLVTVSS

SEQ ID NO: 1047 - protein, 126 aa, synthetic construct
EVQLVESGGGVVQPGGSLRLSCAAPGDTFSQNDIGWFRQAPGKEREFVAAIKWPGGETGYKDKVKGRFTLSRDNAKNTVYLQMNSLRPEDTALYYCAQKIFSRTGTYSASWEYDFWGQGTLVTVSS

SEQ ID NO: 1048 - protein, 126 aa, synthetic construct
EVQLVESGGGVVQPGGSLRLSCAAPGDTFSENDIGWFRQAPGKEREFVAAIKWPGGETGYKDKVKGRFTLSRDNAKNTVYLQMNSLRPEDTALYYCAQKIFSRTGTYSASWEYDFWGQGTLVTVSS

SEQ ID NO: 1049 - protein, 126 aa, synthetic construct
EVQLVESGGGVVQPGGSLRLSCAAPGDTFSQNDIGWFRQAPGKEREFVAAIVWPGGETGYKDKVKGRFTLSRDNAKNTVYLQMNSLRPEDTALYYCAQKIFSRTGTYSASWEYDFWGQGTLVTVSS

SEQ ID NO: 1050 - protein, 126 aa, synthetic construct
EVQLVESGGGVVQPGGSLRLSCAAPGDTFSENDIGWFRQAPGKEREFVAAIVWPGGETGYKDKVKGRFTLSRDNAKNTVYLQMNSLRPEDTALYYCAQKIFSRTGTYSASWEYDFWGQGTLVTVSS

SEQ ID NO: 1051 - protein, 126 aa, synthetic construct
EVQLVESGGGVVQPGGSLRLSCAAPGDTFSQNDIGWFRQAPGKEREFVAAIKWPGAETYYKDKVKGRFTLSRDNAKNTVYLQMNSLRPEDTALYYCAQKIFSRTGTYSASWEYDFWGQGTLVTVSS

SEQ ID NO: 1052 - protein, 126 aa, synthetic construct
EVQLVESGGGVVQPGGSLRLSCAAPGDTFSQNDIGWFRQAPGKEREFVAAIVWPGAETGYKDKVKGRFTLSRDNAKNTVYLQMNSLRPEDTALYYCAQKIFSRTGTYSASWEYDFWGQGTLVTVSS

SEQ ID NO: 1053 - protein, 126 aa, synthetic construct
EVQLVESGGGVVQPGGSLRLSCAAPGDTFSENDIGWFRQAPGKEREFVAAIVWPGGETGYKDAVKGRFTLSRDNAKNTVYLQMNSLRPEDTALYYCAQKIFSRTGTYSASWEYDFWGQGTLVTVSS

SEQ ID NO: 1054 - protein, 126 aa, synthetic construct
EVQLVESGGGVVQPGGSLRLSCAAPGDTFSENDIGWFRQAPGKEREFVAGIVWPGGETYYRDKVKGRFTLSRDNAKNTVSLQMNSLRPEDTALYYCAVKIFSKTGEYSASWEYDFWGQGTLVTVSS

SEQ ID NO: 1055 - protein, 126 aa, synthetic construct
EVQLVESGGGVVQPGGSLRLSCAAPGDTFSENDIGWFRQAPGKEREFVAAIFWPGGETYYRDKVKGRFTLSRDNAKNTVSLQMNSLRPEDTALYYCAVKIFSKTGEYSASWEYDFWGQGTLVTVSS

SEQ ID NO: 1056 - protein, 126 aa, synthetic construct
EVQLVESGGGVVQPGGSLRLSCAAPGDTFSQNDIGWFRQAPGKEREFVAAIKWPGGETYYRDAVKGRFTLSRDNAKNTVYLQMNSLRPEDTALYYCAQKIFSRTGTYSASWEYDFWGQGTLVTVSS

SEQ ID NO: 1057 - protein, 126 aa, synthetic construct
EVQLVESGGGVVQPGGSLRLSCAAPGDTFSQNDIGWFRQAPGKEREFVAAIVWPGAETYYKDAVKGRFTLSRDNAKNTVYLQMNSLRPEDTALYYCAQKIFSRTGTYSASWEYDFWGQGTLVTVSS

SEQ ID NO: 1058 - protein, 126 aa, synthetic construct
EVQLVESGGGVVQPGGSLRLSCAAPGDTFSENDIGWFRQAPGKEREFVAAIVWPGAETYYKDAVKGRFTLSRDNAKNTVYLQMNSLRPEDTALYYCAQKIFSRTGTYSASWEYDFWGQGTLVTVSS

SEQ ID NO: 1059 - protein, 126 aa, synthetic construct
EVQLVESGGGVVQPGGSLRLSCAAPGDTFSQNDIGWFRQAPGKEREFVAAIKWPGGETYYKDAVKGRFTLSRDNAKNTVYLQMNSLRPEDTALYYCAQKIFSRTGTYSASWEYDFWGQGTLVTVSS

SEQ ID NO: 1060 - protein, 126 aa, synthetic construct
EVQLVESGGGVVQPGGSLRLSCAAPGDTFSENDIGWFRQAPGKEREFVAAIKWPGGETYYKDAVKGRFTLSRDNAKNTVYLQMNSLRPEDTALYYCAQKIFSRTGTYSASWEYDFWGQGTLVTVSS

SEQ ID NO: 1061 - protein, 126 aa, synthetic construct
EVQLVESGGGVVQPGGSLRLSCAAPGDTFSQNDIGWFRQAPGKEREFVAAIVWPGGETYYKDAVKGRFTLSRDNAKNTVYLQMNSLRPEDTALYYCAQKIFSRTGTYSASWEYDFWGQGTLVTVSS

SEQ ID NO: 1062 - protein, 126 aa, synthetic construct
EVQLVESGGGVVQPGGSLRLSCAAPGDTFSQNDIGWFRQAPGKEREFVAAIKWPGAETYYRDAVKGRFTLSRDNAKNTVYLQMNSLRPEDTALYYCAQKIFSRTGTYSASWEYDFWGQGTLVTVSS

SEQ ID NO: 1063 - protein, 126 aa, synthetic construct
EVQLVESGGGVVQPGGSLRLSCAAPGDTFSENDIGWFRQAPGKEREFVAAIKWPGAETYYRDAVKGRFTLSRDNAKNTVYLQMNSLRPEDTALYYCAQKIFSRTGTYSASWEYDFWGQGTLVTVSS

SEQ ID NO: 1064 - protein, 126 aa, synthetic construct
EVQLVESGGGVVQPGGSLRLSCAAPGDTFSENDIGWFRQAPGKEREFVAAIVWPGAETYYRDAVKGRFTLSRDNAKNTVYLQMNSLRPEDTALYYCAQKIFSRTGTYSASWEYDFWGQGTLVTVSS

SEQ ID NO: 1065 - protein, 126 aa, synthetic construct
EVQLVESGGGVVQPGGSLRLSCAAPGDTFSQNDIGWFRQAPGKEREFVAAIVWPGAETGYRDAVKGRFTLSRDNAKNTVYLQMNSLRPEDTALYYCAQKIFSRTGTYSASWEYDFWGQGTLVTVSS

SEQ ID NO: 1066 - protein, 126 aa, synthetic construct
EVQLVESGGGVVQPGGSLRLSCAAPGDTFSENDIGWFRQAPGKEREFVAAIVWPGAETGYRDAVKGRFTLSRDNAKNTVYLQMNSLRPEDTALYYCAQKIFSRTGTYSASWEYDFWGQGTLVTVSS

SEQ ID NO: 1067 - protein, 126 aa, synthetic construct
EVQLVESGGGVVQPGGSLRLSCAAPGDTFSQNDIGWFRQAPGKEREFVAAIKWPGGETGYRDAVKGRFTLSRDNAKNTVYLQMNSLRPEDTALYYCAQKIFSRTGTYSASWEYDFWGQGTLVTVSS

SEQ ID NO: 1068 - protein, 126 aa, synthetic construct
EVQLVESGGGVVQPGGSLRLSCAAPGDTFSENDIGWFRQAPGKEREFVAAIKWPGGETGYRDAVKGRFTLSRDNAKNTVYLQMNSLRPEDTALYYCAQKIFSRTGTYSASWEYDFWGQGTLVTVSS

SEQ ID NO: 1069 - protein, 126 aa, synthetic construct
EVQLVESGGGVVQPGGSLRLSCAAPGDTFSQNDIGWFRQAPGKEREFVAAIVWPGGETGYRDAVKGRFTLSRDNAKNTVYLQMNSLRPEDTALYYCAQKIFSRTGTYSASWEYDFWGQGTLVTVSS

SEQ ID NO: 1070 - protein, 126 aa, synthetic construct
EVQLVESGGGVVQPGGSLRLSCAAPGDTFSQNDIGWFRQAPGKEREFVAAIKWPGAETGYRDAVKGRFTLSRDNAKNTVYLQMNSLRPEDTALYYCAQKIFSRTGTYSASWEYDFWGQGTLVTVSS

SEQ ID NO: 1071 - protein, 126 aa, synthetic construct
EVQLVESGGGVVQPGGSLRLSCAAPGDTFSENDIGWFRQAPGKEREFVAAIVWPGGETGYRDAVKGRFTLSRDNAKNTVYLQMNSLRPEDTALYYCAQKIFSRTGTYSASWEYDFWGQGTLVTVSS

SEQ ID NO: 1072 - protein, 126 aa, synthetic construct
EVQLVESGGGVVQPGGSLRLSCAAPGDTFSENDIGWFRQAPGKEREFVAAIKWPGAETYYKDAVKGRFTLSRDNAKNTVYLQMNSLRPEDTALYYCAQKIFSRTGTYSASWEYDFWGQGTLVTVSS

SEQ ID NO: 1073 - protein, 126 aa, synthetic construct
EVQLVESGGGVVQPGGSLRLSCAAPGDTFSENDIGWFRQAPGKEREFVAAIYWPGGETYYRDKVKGRFTLSRDNAKNTVSLQMNSLRPEDTALYYCAVKIFSKTGEYSASWEYDFWGQGTLVTVSS

SEQ ID NO: 1074 - protein, 126 aa, synthetic construct
EVQLVESGGGVVQPGGSLRLSCAAPGDTFSENDIGWFRQAPGKEREFVAAIVWPGGETYYRDKVKGRFTLSRDVAKNTVSLQMNSLRPEDTALYYCAVKIFSKTGTYSASWEYDFWGQGTLVTVSS

SEQ ID NO: 1075 - protein, 126 aa, synthetic construct
EVQLVESGGGVVQPGGSLRLSCAAPGDTFSENDIGWFRQAPGKEREFVAAIYWPGGETYYRDKVKGRFTLSRDKAKNTVYLQMNSLRPEDTALYYCAVKIFSKTGTYSASWEYDFWGQGTLVTVSS

SEQ ID NO: 1076 - protein, 126 aa, synthetic construct
EVQLVESGGGVVQPGGSLRLSCAAPGDTFSENDIGWFRQAPGKEREFVAAIFWPGGETYYRDKVKGRFTLSRDKAKNTVYLQMNSLRAEDTALYYCAVKIFSKTGTYSASWEYDFWGQGTLVTVSS

SEQ ID NO: 1077 - protein, 126 aa, synthetic construct
EVQLVESGGGVVQPGGSLRLSCAAPGDTFSENDIGWFRQAPGKEREFVAAIFWPGGETYYRDKVKGRFTLSRDNYKNTVSLQMNSLRPEDTALYYCAVKIFSKTGTYSASWEYDFWGQGTLVTVSS

SEQ ID NO: 1078 - protein, 126 aa, synthetic construct
EVQLVESGGGVVQPGGSLRLSCAAPGDTFSENDIGWFRQAPGKEREFVAAIVWPGGETYYRDKVKGRFTLSRDVAKNTVYLQMNSLRPEDTALYYCAVKIFSKTGTYSASWEYDFWGQGTLVTVSS

SEQ ID NO: 1079 - protein, 126 aa, synthetic construct
EVQLVESGGGVVQPGGSLRLSCAAPGDTFSENDIGWFRQAPGKEREFVAAIFWPGGETYYRDKVKGRFTLSRDNRKNTVSLQMNSLRPEDTALYYCAVKIFSKTGTYSASWEYDFWGQGTLVTVSS

SEQ ID NO: 1080 - protein, 126 aa, synthetic construct
EVQLVESGGGVVQPGGSLRLSCAAPGDTFSENDIGWFRQAPGKEREFVAAIFWPGGETYYRDKVKGRFTLSRDNKKNTVSLQMNSLRPEDTALYYCAVKIFSKTGTYSASWEYDFWGQGTLVTVSS

SEQ ID NO: 1081 - protein, 126 aa, synthetic construct
EVQLVESGGGVVQPGGSLRLSCAAPGDTFSENDIGWFRQAPGKEREFVAGIVWPGGETYYRDKVKGRFTLSRDKAKNTVYLQMNSLRPEDTALYYCAVKIFSKTGTYSASWEYDFWGQGTLVTVSS

SEQ ID NO: 1082 - protein, 126 aa, synthetic construct
EVQLVESGGGVVQPGGSLRLSCAAPGDTFSENDIGWFRQAPGKEREFVAAIFWPGGETYYRDKVKGRFTLSRDNIKNTVSLQMNSLRPEDTALYYCAVKIFSKTGTYSASWEYDFWGQGTLVTVSS

SEQ ID NO: 1083 - protein, 126 aa, synthetic construct
EVQLVESGGGVVQPGGSLRLSCAAPGDTFSENDIGWFRQAPGKEREFVAAIVWPGGETYYRDKVKGRFTLSRDLAKNTVYLQMNSLRAEDTALYYCAVKIFSKTGTYSASWEYDFWGQGTLVTVSS

SEQ ID NO: 1084 - protein, 126 aa, synthetic construct
EVQLVESGGGVVQPGGSLRLSCAAPGDTFSENDIGWFRQAPGKEREFVAAIFWPGGETYYRDKVKGRFTLSRDKAKNTVYLQMNSLRPEDTALYYCAVKIFSKTGTYSASWEYDFWGQGTLVTVSS

SEQ ID NO: 1085 - protein, 126 aa, synthetic construct
EVQLVESGGGVVQPGGSLRLSCAAPGDTFSENDIGWFRQAPGKEREFVAAIVWPGGETYYRDKVKGRFTLSRDKAKNTVSLQMNSLRPEDTALYYCAVKIFSKTGTYSASWEYDFWGQGTLVTVSS

SEQ ID NO: 1086 - protein, 126 aa, synthetic construct
EVQLVESGGGVVQPGGSLRLSCAAPGDTFSENDIGWFRQAPGKEREFVAAIFWPGGETYYRDKVKGRFTLSRDNLKNTVSLQMNSLRPEDTALYYCAVKIFSKTGTYSASWEYDFWGQGTLVTVSS

SEQ ID NO: 1087 - protein, 126 aa, synthetic construct
EVQLVESGGGVVQPGGSLRLSCAAPGDTFSENDIGWFRQAPGKEREFVAAIVWPGGETYYRDKVKGRFTLSRDNKKNTVSLQMNSLRPEDTALYYCAVKIFSKTGTYSASWEYDFWGQGTLVTVSS

SEQ ID NO: 1088 - protein, 126 aa, synthetic construct
EVQLVESGGGVVQPGGSLRLSCAAPGDTFSENDIGWFRQAPGKEREFVAAIVWPGGETYYRDKVKGRFTLSRDNIKNTVSLQMNSLRPEDTALYYCAVKIFSKTGTYSASWEYDFWGQGTLVTVSS

SEQ ID NO: 1089 - protein, 126 aa, synthetic construct
EVQLVESGGGVVQPGGSLRLSCAAPGDTFSENDIGWFRQAPGKEREFVAAIVWPGGETYYRDKVKGRFTLSRDNLKNTVSLQMNSLRPEDTALYYCAVKIFSKTGTYSASWEYDFWGQGTLVTVSS

SEQ ID NO: 1090 - protein, 126 aa, synthetic construct
EVQLVESGGGVVQPGGSLRLSCAAPGDTFSENDIGWFRQAPGKEREFVAAIYWPGGETYYRDKVKGRFTLSRDLAKNTVYLQMNSLRPEDTALYYCAVKIFSKTGTYSASWEYDFWGQGTLVTVSS

SEQ ID NO: 1091 - protein, 126 aa, synthetic construct
EVQLVESGGGVVQPGGSLRLSCAAPGDTFSENDIGWFRQAPGKEREFVAAIVWPGGETYYRDKVKGRFTLSRDVAKNTVYLQMNSLRAEDTALYYCAVKIFSKTGTYSASWEYDFWGQGTLVTVSS

SEQ ID NO: 1092 - protein, 126 aa, synthetic construct
EVQLVESGGGVVQPGGSLRLSCAAPGDTFSENDIGWFRQAPGKEREFVAAIVWPGGETYYRDKVKGRFTLSRDLAKNTVYLQMNSLRPEDTALYYCAVKIFSKTGTYSASWEYDFWGQGTLVTVSS

SEQ ID NO: 1093 - protein, 126 aa, synthetic construct
EVQLVESGGGVVQPGGSLRLSCAAPGDTFSENDIGWFRQAPGKEREFVAGIVWPGGETYYRDKVKGRFTLSRDVAKNTVYLQMNSLRAEDTALYYCAVKIFSKTGTYSASWEYDFWGQGTLVTVSS

SEQ ID NO: 1094 - protein, 126 aa, synthetic construct
EVQLVESGGGVVQPGGSLRLSCAAPGDTFSENDIGWFRQAPGKEREFVAGIVWPGGETYYRDKVKGRFTLSRDLAKNTVYLQMNSLRPEDTALYYCAVKIFSKTGTYSASWEYDFWGQGTLVTVSS

SEQ ID NO: 1095 - protein, 126 aa, synthetic construct
EVQLVESGGGVVQPGGSLRLSCAAPGDTFSENDIGWFRQAPGKEREFVAGIVWPGGETYYRDKVKGRFTLSRDVAKNTVYLQMNSLRPEDTALYYCAVKIFSKTGTYSASWEYDFWGQGTLVTVSS

SEQ ID NO: 1096 - protein, 126 aa, synthetic construct
EVQLVESGGGVVQPGGSLRLSCAAPGDTFSENDIGWFRQAPGKEREFVAAIYWPGGETYYRDKVKGRFTLSRDVAKNTVYLQMNSLRAEDTALYYCAVKIFSKTGTYSASWEYDFWGQGTLVTVSS

SEQ ID NO: 1097 - protein, 126 aa, synthetic construct
EVQLVESGGGVVQPGGSLRLSCAAPGDTFSENDIGWFRQAPGKEREFVAAIVWPGGETYYRDKVKGRFTLSRDNVKNTVSLQMNSLRPEDTALYYCAVKIFSKTGTYSASWEYDFWGQGTLVTVSS

SEQ ID NO: 1098 - protein, 126 aa, synthetic construct
EVQLVESGGGVVQPGGSLRLSCAAPGDTFSENDIGWFRQAPGKEREFVAAIYWPGGETYYRDKVKGRFTLSRDLAKNTVYLQMNSLRAEDTALYYCAVKIFSKTGTYSASWEYDFWGQGTLVTVSS

SEQ ID NO: 1099 - protein, 126 aa, synthetic construct
EVQLVESGGGVVQPGGSLRLSCAAPGDTFSENDIGWFRQAPGKEREFVAAIYWPGGETYYRDKVKGRFTLSRDVAKNTVYLQMNSLRPEDMALYYCAVKIFSKTGTYSASWEYDFWGQGTLVTVSS

SEQ ID NO: 1100 - protein, 126 aa, synthetic construct
EVQLVESGGGVVQPGGSLRLSCAAPGDTFSENDIGWFRQAPGKEREFVAGIVWPGGETYYRDKVKGRFTLSRDLAKNTVYLQMNSLRAEDTALYYCAVKIFSKTGTYSASWEYDFWGQGTLVTVSS

SEQ ID NO: 1101 - protein, 126 aa, synthetic construct
EVQLVESGGGVVQPGGSLRLSCAAPGDTFSENDIGWFRQAPGKEREFVAAIFWPGGETYYRDKVKGRFTLSRDVAKNTVYLQMNSLRPEDTALYYCAVKIFSKTGTYSASWEYDFWGQGTLVTVSS

SEQ ID NO: 1102 - protein, 126 aa, synthetic construct
EVQLVESGGGVVQPGGSLRLSCAAPGDTFSENDIGWFRQAPGKEREFVAAIVWPGGETYYRDKVKGRFTLSRDKAKNTVYLQMNSLRPEDTALYYCAVKIFSKTGTYSASWEYDFWGQGTLVTVSS

SEQ ID NO: 1103 - protein, 126 aa, synthetic construct
EVQLVESGGGVVQPGGSLRLSCAAPGDTFSENDIGWFRQAPGKEREFVAGIVWPGGETYYRDKVKGRFTLSRDKAKNTVYLQMNSLRAEDTALYYCAVKIFSKTGTYSASWEYDFWGQGTLVTVSS

SEQ ID NO: 1104 - protein, 126 aa, synthetic construct
EVQLVESGGGVVQPGGSLRLSCAAPGDTFSENDIGWFRQAPGKEREFVAAIVWPGGETYYRDKVKGRFTLSRDKAKNTVYLQMNSLRAEDTALYYCAVKIFSKTGTYSASWEYDFWGQGTLVTVSS

SEQ ID NO: 1105 - protein, 126 aa, synthetic construct
EVQLVESGGGVVQPGGSLRLSCAAPGDTFSENDIGWFRQAPGKEREFVAAIVWPGGETYYRDKVKGRFTLSRDNRKNTVSLQMNSLRPEDTALYYCAVKIFSKTGTYSASWEYDFWGQGTLVTVSS

SEQ ID NO: 1106 - protein, 126 aa, synthetic construct
EVQLVESGGGVVQPGGSLRLSCAAPGDTFSENDIGWFRQAPGKEREFVAAIVWPGGETYYRDKVKGRFTLSRDLAKNTVSLQMNSLRPEDTALYYCAVKIFSKTGTYSASWEYDFWGQGTLVTVSS

SEQ ID NO: 1107 - protein, 126 aa, synthetic construct
EVQLVESGGGVVQPGGSLRLSCAAPGDTFSENDIGWFRQAPGKEREFVAAIFWPGGETYYRDKVKGRFTLSRDLAKNTVYLQMNSLRAEDTALYYCAVKIFSKTGTYSASWEYDFWGQGTLVTVSS

SEQ ID NO: 1108 - protein, 126 aa, synthetic construct
EVQLVESGGGVVQPGGSLRLSCAAPGDTFSENDIGWFRQAPGKEREFVAAIFWPGGETYYRDKVKGRFTLSRDLAKNTVYLQMNSLRPEDTALYYCAVKIFSKTGTYSASWEYDFWGQGTLVTVSS

SEQ ID NO: 1109 - protein, 126 aa, synthetic construct
EVQLVESGGGVVQPGGSLRLSCAAPGDTFSENDIGWFRQAPGKEREFVAAIVWPGGETYYRDKVKGRFTLSRDNYKNTVSLQMNSLRPEDTALYYCAVKIFSKTGTYSASWEYDFWGQGTLVTVSS

SEQ ID NO: 1110 - protein, 126 aa, synthetic construct
EVQLVESGGGVVQPGGSLRLSCAAPGDTFSENDIGWFRQAPGKEREFVAAIFWPGGETYYRDKVKGRFTLSRDNAKNTVSLQMNSLRPEDTALYYCAVKIFSKTGTYSASWEYDFWGQGTLVTVSS

SEQ ID NO: 1111 - protein, 126 aa, synthetic construct
EVQLVESGGGVVQPGGSLRLSCAAPGDTFSENDIGWFRQAPGKEREFVAAIVWPGGETYYRDKVKGRFTLSRDNAKNTVSLQMNSLRPEDTALYYCAVKIFSKTGTYSASWEYDFWGQGTLVTVSS

SEQ ID NO: 1112 - protein, 126 aa, synthetic construct
EVQLVESGGGVVQPGGSLRLSCAAPGDTFSENDIGWFRQAPGKEREFVAAIVWPGGETYYRDKVKGRFTLSRDNAKNTVDLQMNSLRPEDTALYYCAVKIFSKTGTYSASWEYDFWGQGTLVTVSS

SEQ ID NO: 1113 - protein, 126 aa, synthetic construct
EVQLVESGGGVVQPGGSLRLSCAAPGDTFSENDIGWFRQAPGKEREFVAAIFWPGGETYYRDKVKGRFTLSRDNAKNTVDLQMNSLRPEDTALYYCAVKIFSKTGTYSASWEYDFWGQGTLVTVSS

SEQ ID NO: 1114 - protein, 126 aa, synthetic construct
EVQLVESGGGVVQPGGSLRLSCAAPGDTFSENDIGWFRQAPGKEREFVAAIYWPGGETYYRDKVKGRFTLSRDNAKNTVSLQMNSLRPEDTALYYCAVKIFSKTGTYSASWEYDFWGQGTLVTVSS

SEQ ID NO: 1115 - protein, 126 aa, synthetic construct
EVQLVESGGGVVQPGGSLRLSCAAPGDTFSENDIGWFRQAPGKEREFVAAIFWPGGETYYRDKVKGRFTLSRDNAKNTVYLQMNSLRPEDTALYYCAVKIFSKTGTYSASWEYDFWGQGTLVTVSS

SEQ ID NO: 1116 - protein, 126 aa, synthetic construct
EVQLVESGGGVVQPGGSLRLSCAAPGDTFSENDIGWFRQAPGKEREFVAAIYWPGGETYYRDKVKGRFTLSRDNAKNTVSLQMNSLRPEDTALYYCALKIFSKTGEYSASWEYDFWGQGTLVTVSS

SEQ ID NO: 1117 - protein, 126 aa, synthetic construct
EVQLVESGGGVVQPGGSLRLSCAAPGDTFSENDIGWFRQAPGKEREFVAAIFWPGGETYYRDKVKGRFTLSRDNAKNTVSLQMNSLRPEDTALYYCALKIFSKTGEYSASWEYDFWGQGTLVTVSS

SEQ ID NO: 1118 - protein, 126 aa, synthetic construct
EVQLVESGGGVVQPGGSLRLSCAAPGDTFSENDIGWFRQAPGKEREFVAGIVWPGGETYYRDKVKGRFTLSRDNAKNTVSLQMNSLRPEDTALYYCALKIFSKTGEYSASWEYDFWGQGTLVTVSS

SEQ ID NO: 1119 - protein, 126 aa, synthetic construct
EVQLVESGGGVVQPGGSLRLSCAAPGDTFSENDIGWFRQAPGKEREFVAAIYWPGGETYYRDKVKGRFTLSRDNAKNTVDLQMNSLRPEDTALYYCALKIFSKTGEYSASWEYDFWGQGTLVTVSS

SEQ ID NO: 1120 - protein, 126 aa, synthetic construct
EVQLVESGGGVVQPGGSLRLSCAAPGDTFSENDIGWFRQAPGKEREFVAAIFWPGGETYYRDKVKGRFTLSRDNAKNTVDLQMNSLRPEDTALYYCALKIFSKTGEYSASWEYDFWGQGTLVTVSS

SEQ ID NO: 1121 - protein, 126 aa, synthetic construct
EVQLVESGGGVVQPGGSLRLSCAAPGDTFSENDIGWFRQAPGKEREFVAGIVWPGGETYYRDKVKGRFTLSRDNAKNTVDLQMNSLRPEDTALYYCALKIFSKTGEYSASWEYDFWGQGTLVTVSS

SEQ ID NO: 1122 - protein, 126 aa, synthetic construct
EVQLVESGGGVVQPGGSLRLSCAAPGDTFSENDIGWFRQAPGKEREFVAGIVWPGGETYYRDKVKGRFTLSRDNAKNTVDLQMNSLRPEDTALYYCAVKIFSKTGTYSASWEYDFWGQGTLVTVSS

SEQ ID NO: 1123 - protein, 126 aa, synthetic construct
EVQLVESGGGVVQPGGSLRLSCAAPGDTFSENDIGWFRQAPGKEREFVAGIVWPGGETYYRDKVKGRFTLSRDNAKNTVYLQMNSLRPEDTALYYCAVKIFSKTGTYSASWEYDFWGQGTLVTVSS

SEQ ID NO: 1124 - protein, 126 aa, synthetic construct
EVQLVESGGGVVQPGGSLRLSCAAPGDTFSENDIGWFRQAPGKEREFVAAIYWPGGETYYRDKVKGRFTLSRDNAKNTVYLQMNSLRPEDTALYYCAVKIFSKTGTYSASWEYDFWGQGTLVTVSS

SEQ ID NO: 1125 - protein, 126 aa, synthetic construct
EVQLVESGGGVVQPGGSLRLSCAAPGDTFSENDIGWFRQAPGKEREFVAGIVWPGGETYYRDKVKGRFTLSRDNAKNTVSLQMNSLRPEDTALYYCAVKIFSKTGTYSASWEYDFWGQGTLVTVSS

SEQ ID NO: 1126 - protein, 126 aa, synthetic construct
EVQLVESGGGVVQPGGSLRLSCAAPGDTFSQNDIGWFRQAPGKEREFVAGIKWPGGETGYKDKVKGRFTLSRDNAKNTVYLQMNSLRPEDTALYYCAVKIFSKTGTYSASWEYDFWGQGTLVTVSS

SEQ ID NO: 1127 - protein, 126 aa, synthetic construct
EVQLVESGGGVVQPGGSLRLSCAAPGDTFSENDIGWFRQAPGKEREFVAAIYWPGGETYYRDKVKGRFTLSRDNAKNTVDLQMNSLRPEDTALYYCAVKIFSKTGTYSASWEYDFWGQGTLVTVSS

SEQ ID NO: 1128 - protein, 126 aa, synthetic construct
EVQLVESGGGVVQPGGSLRLSCAAPGDTFSENDIGWFRQAPGKEREFVAAIFWPGGETYYRDKVKGRFTLSRDQAKNTVSLQMNSLRPEDTALYYCAVKIFSKTGTYSASWEYDFWGQGTLVTVSS

SEQ ID NO: 1129 - protein, 126 aa, synthetic construct
EVQLVESGGGVVQPGGSLRLSCAAPGDTFSENDIGWFRQAPGKEREFVAAIFWPGGETYYRDKVKGRFTLSRDVAKNTVSLQMNSLRPEDTALYYCAVKIFSKTGTYSASWEYDFWGQGTLVTVSS

SEQ ID NO: 1130 - protein, 126 aa, synthetic construct
EVQLVESGGGVVQPGGSLRLSCAAPGDTFSENDIGWFRQAPGKEREFVAAIYWPGGETYYRDKVKGRFTLSRDKAKNTVYLQMNSLRAEDTALYYCAVKIFSKTGTYSASWEYDFWGQGTLVTVSS

SEQ ID NO: 1131 - protein, 126 aa, synthetic construct
EVQLVESGGGVVQPGGSLRLSCAAPGDTFSENDIGWFRQAPGKEREFVAAIFWPGGETYYRDKVKGRFTLSRDLAKNTVSLQMNSLRPEDTALYYCAVKIFSKTGTYSASWEYDFWGQGTLVTVSS

SEQ ID NO: 1132 - protein, 126 aa, synthetic construct
EVQLVESGGGVVQPGGSLRLSCAAPGDTFSENDIGWFRQAPGKEREFVAAIFWPGGETYYRDKVKGRFTLSRDEAKNTVSLQMNSLRPEDTALYYCAVKIFSKTGTYSASWEYDFWGQGTLVTVSS

SEQ ID NO: 1133 - protein, 126 aa, synthetic construct
EVQLVESGGGVVQPGGSLRLSCAAPGDTFSENDIGWFRQAPGKEREFVAAIFWPGGETYYRDKVKGRFTLSRDFAKNTVSLQMNSLRPEDTALYYCAVKIFSKTGTYSASWEYDFWGQGTLVTVSS

SEQ ID NO: 1134 - protein, 126 aa, synthetic construct
EVQLVESGGGVVQPGGSLRLSCAAPGDTFSENDIGWFRQAPGKEREFVAAIFWPGGETYYRDKVKGRFTLSRDYAKNTVSLQMNSLRPEDTALYYCAVKIFSKTGTYSASWEYDFWGQGTLVTVSS

SEQ ID NO: 1135 - protein, 126 aa, synthetic construct
EVQLVESGGGVVQPGGSLRLSCAAPGDTFSENDIGWFRQAPGKEREFVAAIFWPGGETYYRDKVKGRFTLSRDPAKNTVSLQMNSLRPEDTALYYCAVKIFSKTGTYSASWEYDFWGQGTLVTVSS

SEQ ID NO: 1136 - protein, 126 aa, synthetic construct
EVQLVESGGGVVQPGGSLRLSCAAPGDTFSENDIGWFRQAPGKEREFVAAIFWPGGETYYRDKVKGRFTLSRDKAKNTVSLQMNSLRPEDTALYYCAVKIFSKTGTYSASWEYDFWGQGTLVTVSS

SEQ ID NO: 1137 - protein, 126 aa, synthetic construct
DVQLVESGGGVVQPGGSLRLSCAAPGDTFSENDIGWFRQAPGKEREFVAAIFWPGGETYYRDKVKGRFTLSRDNAKNTVSLQMNSLRPEDTALYYCAVKIFSKTGTYSASWEYDFWGQGTLVTVSS

SEQ ID NO: 1138 - protein, 126 aa, synthetic construct
EVQLVESGGGVVQPGGSLRLSCAAPGDTFSENDIGWFRQAPGKEREFVAAIFWPGGETYYRDKVKGRFTLSRDIAKNTVSLQMNSLRPEDTALYYCAVKIFSKTGTYSASWEYDFWGQGTLVTVSS

SEQ ID NO: 1139 - protein, 126 aa, synthetic construct
EVQLVESGGGVVQPGGSLRLSCAAPGDTFSQNDIGWFRQAPGKEREFVAGIKWPGGETGYKDKVKGRFTLSRDNAKNTVSLQMNSLRPEDTALYYCAVKIFSKTGTYSASWEYDFWGQGTLVTVSS

SEQ ID NO: 1140 - protein, 126 aa, synthetic construct
EVQLVESGGGVVQPGGSLRLSCAAPGDTFSQNDIGWFRQAPGKEREFVAAIKWPGGETGYKDKVKGRFTLSRDNAKNTVSLQMNSLRPEDTALYYCAVKIFSKTGTYSASWEYDFWGQGTLVTVSS

SEQ ID NO: 1141 - protein, 126 aa, synthetic construct
EVQLVESGGGVVQPGGSLRLSCAAPGDTFSQNDIGWFRQAPGKEREFVAGIKWPGGETGYKDKVKGRFTLSRDNAKNTVDLQMNSLRPEDTALYYCAVKIFSKTGTYSASWEYDFWGQGTLVTVSS

SEQ ID NO: 1142 - protein, 126 aa, synthetic construct
EVQLVESGGGVVQPGGSLRLSCAAPGDTFSQNDIGWFRQAPGKEREFVAAIKWPGGETGYKDKVKGRFTLSRDNAKNTVDLQMNSLRPEDTALYYCAVKIFSKTGTYSASWEYDFWGQGTLVTVSS

SEQ ID NO: 1143 - protein, 126 aa, synthetic construct
EVQLVESGGGVVQPGGSLRLSCAAPGDTFSENDIGWFRQAPGKEREFVAAIKWPGAETYYKDKVKGRFTLSRDNAKNTVYLQMNSLRPEDTALYYCAQKIFSRTGTYSASWEYDFWGQGTLVTVSS

SEQ ID NO: 1144 - protein, 126 aa, synthetic construct
EVQLVESGGGVVQPGGSLRLSCAAPGDTFSENDIGWFRQTPGKEREFVAAIVWPGGETYYRDSVKGRFTLSRDNAKNTVYLQMNSLRPEDTALYSCAVKIFSKTGTYSISWEYDFWGQGTLVTVSS

SEQ ID NO: 1145 - protein, 126 aa, synthetic construct
EVQLVESGGGVVQPGGSLRLSCAAPGDTFSENDIGWFRQTPGKEREFVAAIVWPGGETYYRDSVKGRFTLSRDNAKNTVYLQMNSLRPEDTALYSCAVKIFSKTGTYSAFWEYDFWGQGTLVTVSS

SEQ ID NO: 1146 - protein, 126 aa, synthetic construct
EVQLVESGGGVVQPGGSLRLSCAAPGDTFSENDIGWFRQTPGKEREFVAAIVWPGGETYYRDSVKGRFTLSRDNAKNTVYLQMNSLRPEDTALYSCAVKIFSKTGTYSAAWEYDFWGQGTLVTVSS

SEQ ID NO: 1147 - protein, 126 aa, synthetic construct
EVQLVESGGGVVQPGGSLRLSCAAPGDTFSENDIGWFRQAPGKEREFVAAIKWPGGETYYKDAVKGRFTLSRDNAKNTVYLQMNSLRPEDTALYYCAQKIFSTTGTYSASWEYDFWGQGTLVTVSS

SEQ ID NO: 1148 - protein, 126 aa, synthetic construct
EVQLVESGGGVVQPGGSLRLSCAAPGDTFSQNDIGWFRQAPGKEREFVAAIVWPGGETYYKDAVKGRFTLSRDNAKNTVYLQMNSLRPEDTALYYCAQKIFSTTGTYSASWEYDFWGQGTLVTVSS

SEQ ID NO: 1149 - protein, 126 aa, synthetic construct
EVQLVESGGGVVQPGGSLRLSCAAPGDTFSENDIGWFRQAPGKEREFVAAIVWPGGETYYKDAVKGRFTLSRDNAKNTVYLQMNSLRPEDTALYYCAQKIFSTTGTYSASWEYDFWGQGTLVTVSS

SEQ ID NO: 1150 - protein, 126 aa, synthetic construct
EVQLVESGGGVVQPGGSLRLSCAAPGDTFSQNDIGWFRQAPGKEREFVAAIKWPGAETGYRDAVKGRFTLSRDNAKNTVYLQMNSLRPEDTALYYCAQKIFSTTGTYSASWEYDFWGQGTLVTVSS

SEQ ID NO: 1151 - protein, 126 aa, synthetic construct
EVQLVESGGGVVQPGGSLRLSCAAPGDTFSENDIGWFRQAPGKEREFVAAIKWPGAETGYRDAVKGRFTLSRDNAKNTVYLQMNSLRPEDTALYYCAQKIFSTTGTYSASWEYDFWGQGTLVTVSS

SEQ ID NO: 1152 - protein, 126 aa, synthetic construct
EVQLVESGGGVVQPGGSLRLSCAAPGDTFSQNDIGWFRQAPGKEREFVAAIVWPGAETGYRDAVKGRFTLSRDNAKNTVYLQMNSLRPEDTALYYCAQKIFSTTGTYSASWEYDFWGQGTLVTVSS

SEQ ID NO: 1153 - protein, 126 aa, synthetic construct
EVQLVESGGGVVQPGGSLRLSCAAPGDTFSQNDIGWFRQAPGKEREFVAAIKWPGGETYYKDAVKGRFTLSRDNAKNTVYLQMNSLRPEDTALYYCAQKIFSTTGTYSASWEYDFWGQGTLVTVSS

SEQ ID NO: 1154 - protein, 126 aa, synthetic construct
EVQLVESGGGVVQPGGSLRLSCAAPGDTFSQNDIGWFRQAPGKEREFVAAIKWPGGETGYRDAVKGRFTLSRDNAKNTVYLQMNSLRPEDTALYYCAQKIFSTTGTYSASWEYDFWGQGTLVTVSS

SEQ ID NO: 1155 - protein, 126 aa, synthetic construct
EVQLVESGGGVVQPGGSLRLSCAAPGDTFSQNDIGWFRQAPGKEREFVAAIVWPGGETGYRDAVKGRFTLSRDNAKNTVYLQMNSLRPEDTALYYCAQKIFSTTGTYSASWEYDFWGQGTLVTVSS

SEQ ID NO: 1156 - protein, 126 aa, synthetic construct
EVQLVESGGGVVQPGGSLRLSCAAPGDTFSENDIGWFRQAPGKEREFVAAIVWPGGETGYRDAVKGRFTLSRDNAKNTVYLQMNSLRPEDTALYYCAQKIFSTTGTYSASWEYDFWGQGTLVTVSS

SEQ ID NO: 1157 - protein, 126 aa, synthetic construct
EVQLVESGGGVVQPGGSLRLSCAAPGDTFSQNDIGWFRQAPGKEREFVAAIKWPGAETYYRDAVKGRFTLSRDNAKNTVYLQMNSLRPEDTALYYCAQKIFSTTGTYSASWEYDFWGQGTLVTVSS

SEQ ID NO: 1158 - protein, 126 aa, synthetic construct
EVQLVESGGGVVQPGGSLRLSCAAPGDTFSQNDIGWFRQAPGKEREFVAAIVWPGAETYYRDAVKGRFTLSRDNAKNTVYLQMNSLRPEDTALYYCAQKIFSTTGTYSASWEYDFWGQGTLVTVSS

SEQ ID NO: 1159 - protein, 126 aa, synthetic construct
EVQLVESGGGVVQPGGSLRLSCAAPGDTFSENDIGWFRQAPGKEREFVAAIVWPGAETYYRDAVKGRFTLSRDNAKNTVYLQMNSLRPEDTALYYCAQKIFSTTGTYSASWEYDFWGQGTLVTVSS

SEQ ID NO: 1160 - protein, 126 aa, synthetic construct
EVQLVESGGGVVQPGGSLRLSCAAPGDTFSQNDIGWFRQAPGKEREFVAAIKWPGGETYYRDAVKGRFTLSRDNAKNTVYLQMNSLRPEDTALYYCAQKIFSTTGTYSASWEYDFWGQGTLVTVSS

SEQ ID NO: 1161 - protein, 126 aa, synthetic construct
EVQLVESGGGVVQPGGSLRLSCAAPGDTFSENDIGWFRQAPGKEREFVAAIKWPGGETGYRDAVKGRFTLSRDNAKNTVYLQMNSLRPEDTALYYCAQKIFSTTGTYSASWEYDFWGQGTLVTVSS

SEQ ID NO: 1162 - protein, 126 aa, synthetic construct
EVQLVESGGGVVQPGGSLRLSCAAPGDTFSENDIGWFRQAPGKEREFVAAIKWPGGETYYRDAVKGRFTLSRDNAKNTVYLQMNSLRPEDTALYYCAQKIFSTTGTYSASWEYDFWGQGTLVTVSS

SEQ ID NO: 1163 - protein, 126 aa, synthetic construct
EVQLVESGGGVVQPGGSLRLSCAAPGDTFSQNDIGWFRQAPGKEREFVAAIVWPGAETYYRDKVKGRFTLSRDNAKNTVYLQMNSLRPEDTALYYCAVKIFSRTGTYSASWEYDFWGQGTLVTVSS

SEQ ID NO: 1164 - protein, 126 aa, synthetic construct
EVQLVESGGGVVQPGGSLRLSCAAPGDTFSENDIGWFRQAPGKEREFVAAIKWPGAETGYKDAVKGRFTLSRDNAKNTVYLQMNSLRPEDTALYYCAQKIFSTTGTYSASWEYDFWGQGTLVTVSS

SEQ ID NO: 1165 - protein, 126 aa, synthetic construct
EVQLVESGGGVVQPGGSLRLSCAAPGDTFSENDIGWFRQAPGKEREFVAAIKWPGAETGYKDKVKGRFTLSRDNAKNTVYLQMNSLRPEDTALYYCAQKIFSTTGTYSASWEYDFWGQGTLVTVSS

SEQ ID NO: 1166 - protein, 126 aa, synthetic construct
EVQLVESGGGVVQPGGSLRLSCAAPGDTFSQNDIGWFRQAPGKEREFVAAIKWPGGETYYRDKVKGRFTLSRDNAKNTVYLQMNSLRPEDTALYYCAVKIFSRTGTYSASWEYDFWGQGTLVTVSS

SEQ ID NO: 1167 - protein, 126 aa, synthetic construct
EVQLVESGGGVVQPGGSLRLSCAAPGDTFSENDIGWFRQAPGKEREFVAAIKWPGGETYYRDKVKGRFTLSRDNAKNTVYLQMNSLRPEDTALYYCAVKIFSRTGTYSASWEYDFWGQGTLVTVSS

SEQ ID NO: 1168 - protein, 126 aa, synthetic construct
EVQLVESGGGVVQPGGSLRLSCAAPGDTFSQNDIGWFRQAPGKEREFVAAIVWPGGETYYRDKVKGRFTLSRDNAKNTVYLQMNSLRPEDTALYYCAVKIFSRTGTYSASWEYDFWGQGTLVTVSS

SEQ ID NO: 1169 - protein, 126 aa, synthetic construct
EVQLVESGGGVVQPGGSLRLSCAAPGDTFSENDIGWFRQAPGKEREFVAAIVWPGGETYYRDKVKGRFTLSRDNAKNTVYLQMNSLRPEDTALYYCAVKIFSRTGTYSASWEYDFWGQGTLVTVSS

SEQ ID NO: 1170 - protein, 126 aa, synthetic construct
EVQLVESGGGVVQPGGSLRLSCAAPGDTFSQNDIGWFRQAPGKEREFVAAIKWPGAETGYKDAVKGRFTLSRDNAKNTVYLQMNSLRPEDTALYYCAQKIFSTTGTYSASWEYDFWGQGTLVTVSS

SEQ ID NO: 1171 - protein, 126 aa, synthetic construct
EVQLVESGGGVVQPGGSLRLSCAAPGDTFSQNDIGWFRQAPGKEREFVAAIVWPGAETYYKDAVKGRFTLSRDNAKNTVYLQMNSLRPEDTALYYCAQKIFSTTGTYSASWEYDFWGQGTLVTVSS

SEQ ID NO: 1172 - protein, 126 aa, synthetic construct
EVQLVESGGGVVQPGGSLRLSCAAPGDTFSENDIGWFRQAPGKEREFVAAIVWPGAETYYKDAVKGRFTLSRDNAKNTVYLQMNSLRPEDTALYYCAQKIFSTTGTYSASWEYDFWGQGTLVTVSS

SEQ ID NO: 1173 - protein, 126 aa, synthetic construct
EVQLVESGGGVVQPGGSLRLSCAAPGDTFSQNDIGWFRQAPGKEREFVAAIVWPGGETYYRDAVKGRFTLSRDNAKNTVYLQMNSLRPEDTALYYCAQKIFSTTGTYSASWEYDFWGQGTLVTVSS

SEQ ID NO: 1174 - protein, 126 aa, synthetic construct
EVQLVESGGGVVQPGGSLRLSCAAPGDTFSQNDIGWFRQAPGKEREFVAAIKWPGGETGYKDAVKGRFTLSRDNAKNTVYLQMNSLRPEDTALYYCAQKIFSTTGTYSASWEYDFWGQGTLVTVSS

SEQ ID NO: 1175 - protein, 126 aa, synthetic construct
EVQLVESGGGVVQPGGSLRLSCAAPGDTFSENDIGWFRQAPGKEREFVAAIKWPGGETGYKDAVKGRFTLSRDNAKNTVYLQMNSLRPEDTALYYCAQKIFSTTGTYSASWEYDFWGQGTLVTVSS

SEQ ID NO: 1176 - protein, 126 aa, synthetic construct
EVQLVESGGGVVQPGGSLRLSCAAPGDTFSQNDIGWFRQAPGKEREFVAAIVWPGGETGYKDAVKGRFTLSRDNAKNTVYLQMNSLRPEDTALYYCAQKIFSTTGTYSASWEYDFWGQGTLVTVSS

SEQ ID NO: 1177 - protein, 126 aa, synthetic construct
EVQLVESGGGVVQPGGSLRLSCAAPGDTFSENDIGWFRQAPGKEREFVAAIVWPGGETGYKDAVKGRFTLSRDNAKNTVYLQMNSLRPEDTALYYCAQKIFSTTGTYSASWEYDFWGQGTLVTVSS

SEQ ID NO: 1178 - protein, 126 aa, synthetic construct
EVQLVESGGGVVQPGGSLRLSCAAPGDTFSQNDIGWFRQAPGKEREFVAAIKWPGAETYYKDAVKGRFTLSRDNAKNTVYLQMNSLRPEDTALYYCAQKIFSTTGTYSASWEYDFWGQGTLVTVSS

SEQ ID NO: 1179 - protein, 126 aa, synthetic construct
EVQLVESGGGVVQPGGSLRLSCAAPGDTFSQNDIGWFRQAPGKEREFVAAIVWPGAETGYKDAVKGRFTLSRDNAKNTVYLQMNSLRPEDTALYYCAQKIFSTTGTYSASWEYDFWGQGTLVTVSS

SEQ ID NO: 1180 - protein, 126 aa, synthetic construct
EVQLVESGGGVVQPGGSLRLSCAAPGDTFSENDIGWFRQAPGKEREFVAAIKWPGAETYYKDAVKGRFTLSRDNAKNTVYLQMNSLRPEDTALYYCAQKIFSTTGTYSASWEYDFWGQGTLVTVSS

SEQ ID NO: 1181 - protein, 126 aa, synthetic construct
EVQLVESGGGVVQPGGSLRLSCAAPGDTFSENDIGWFRQAPGKEREFVAAIVWPGAETYYRDKVKGRFTLSRDNAKNTVYLQMNSLRPEDTALYYCAVKIFSRTGTYSASWEYDFWGQGTLVTVSS

SEQ ID NO: 1182 - protein, 126 aa, synthetic construct
EVQLVESGGGVVQPGGSLRLSCAAPGDTFSENDIGWFRQAPGKEREFVAAIVWPGAETGYKDAVKGRFTLSRDNAKNTVYLQMNSLRPEDTALYYCAQKIFSTTGTYSASWEYDFWGQGTLVTVSS

SEQ ID NO: 1183 - protein, 126 aa, synthetic construct
EVQLVESGGGVVQPGGSLRLSCAAPGDTFSENDIGWFRQAPGKEREFVAAIKWPGAETYYKDKVKGRFTLSRDNAKNTVYLQMNSLRPEDTALYYCAQKIFSTTGTYSASWEYDFWGQGTLVTVSS

SEQ ID NO: 1184 - protein, 126 aa, synthetic construct
EVQLVESGGGVVQPGGSLRLSCAAPGDTFSQNDIGWFRQAPGKEREFVAAIKWPGGETYYKDKVKGRFTLSRDNAKNTVYLQMNSLRPEDTALYYCAQKIFSTTGTYSASWEYDFWGQGTLVTVSS

SEQ ID NO: 1185 - protein, 126 aa, synthetic construct
EVQLVESGGGVVQPGGSLRLSCAAPGDTFSENDIGWFRQAPGKEREFVAAIKWPGAETYYRDKVKGRFTLSRDNAKNTVYLQMNSLRPEDTALYYCAQKIFSTTGTYSASWEYDFWGQGTLVTVSS

SEQ ID NO: 1186 - protein, 126 aa, synthetic construct
EVQLVESGGGVVQPGGSLRLSCAAPGDTFSQNDIGWFRQAPGKEREFVAAIVWPGAETYYRDKVKGRFTLSRDNAKNTVYLQMNSLRPEDTALYYCAQKIFSTTGTYSASWEYDFWGQGTLVTVSS

SEQ ID NO: 1187 - protein, 126 aa, synthetic construct
EVQLVESGGGVVQPGGSLRLSCAAPGDTFSENDIGWFRQAPGKEREFVAAIVWPGAETYYRDKVKGRFTLSRDNAKNTVYLQMNSLRPEDTALYYCAQKIFSTTGTYSASWEYDFWGQGTLVTVSS

SEQ ID NO: 1188 - protein, 126 aa, synthetic construct
EVQLVESGGGVVQPGGSLRLSCAAPGDTFSQNDIGWFRQAPGKEREFVAAIKWPGGETYYRDKVKGRFTLSRDNAKNTVYLQMNSLRPEDTALYYCAQKIFSTTGTYSASWEYDFWGQGTLVTVSS

SEQ ID NO: 1189 - protein, 126 aa, synthetic construct
EVQLVESGGGVVQPGGSLRLSCAAPGDTFSENDIGWFRQAPGKEREFVAAIKWPGGETGYRDKVKGRFTLSRDNAKNTVYLQMNSLRPEDTALYYCAQKIFSTTGTYSASWEYDFWGQGTLVTVSS

SEQ ID NO: 1190 - protein, 126 aa, synthetic construct
EVQLVESGGGVVQPGGSLRLSCAAPGDTFSENDIGWFRQAPGKEREFVAAIKWPGGETYYRDKVKGRFTLSRDNAKNTVYLQMNSLRPEDTALYYCAQKIFSTTGTYSASWEYDFWGQGTLVTVSS

SEQ ID NO: 1191 - protein, 126 aa, synthetic construct
EVQLVESGGGVVQPGGSLRLSCAAPGDTFSENDIGWFRQAPGKEREFVAAIVWPGGETYYRDKVKGRFTLSRDNAKNTVYLQMNSLRPEDTALYYCAQKIFSTTGTYSASWEYDFWGQGTLVTVSS

SEQ ID NO: 1192 - protein, 126 aa, synthetic construct
EVQLVESGGGVVQPGGSLRLSCAAPGDTFSQNDIGWFRQAPGKEREFVAAIKWPGAETGYKDAVKGRFTLSRDNAKNTVYLQMNSLRPEDTALYYCAVKIFSTTGTYSASWEYDFWGQGTLVTVSS

SEQ ID NO: 1193 - protein, 126 aa, synthetic construct
EVQLVESGGGVVQPGGSLRLSCAAPGDTFSENDIGWFRQAPGKEREFVAAIKWPGAETGYKDAVKGRFTLSRDNAKNTVYLQMNSLRPEDTALYYCAVKIFSTTGTYSASWEYDFWGQGTLVTVSS

SEQ ID NO: 1194 - protein, 126 aa, synthetic construct
EVQLVESGGGVVQPGGSLRLSCAAPGDTFSQNDIGWFRQAPGKEREFVAAIVWPGAETGYKDAVKGRFTLSRDNAKNTVYLQMNSLRPEDTALYYCAVKIFSTTGTYSASWEYDFWGQGTLVTVSS

SEQ ID NO: 1195 - protein, 126 aa, synthetic construct
EVQLVESGGGVVQPGGSLRLSCAAPGDTFSQNDIGWFRQAPGKEREFVAAIKWPGGETGYKDAVKGRFTLSRDNAKNTVYLQMNSLRPEDTALYYCAVKIFSTTGTYSASWEYDFWGQGTLVTVSS

SEQ ID NO: 1196 - protein, 126 aa, synthetic construct
EVQLVESGGGVVQPGGSLRLSCAAPGDTFSENDIGWFRQAPGKEREFVAAIKWPGGETGYKDAVKGRFTLSRDNAKNTVYLQMNSLRPEDTALYYCAVKIFSTTGTYSASWEYDFWGQGTLVTVSS

SEQ ID NO: 1197 - protein, 126 aa, synthetic construct
EVQLVESGGGVVQPGGSLRLSCAAPGDTFSQNDIGWFRQAPGKEREFVAAIVWPGGETYYRDKVKGRFTLSRDNAKNTVYLQMNSLRPEDTALYYCAQKIFSTTGTYSASWEYDFWGQGTLVTVSS

SEQ ID NO: 1198 - protein, 126 aa, synthetic construct
EVQLVESGGGVVQPGGSLRLSCAAPGDTFSQNDIGWFRQAPGKEREFVAAIKWPGAETGYKDKVKGRFTLSRDNAKNTVYLQMNSLRPEDTALYYCAQKIFSTTGTYSASWEYDFWGQGTLVTVSS

SEQ ID NO: 1199 - protein, 126 aa, synthetic construct
EVQLVESGGGVVQPGGSLRLSCAAPGDTFSENDIGWFRQAPGKEREFVAAIKWPGAETYYRDKVKGRFTLSRDNAKNTVYLQMNSLRPEDTALYYCAVKIFSRTGTYSASWEYDFWGQGTLVTVSS

SEQ ID NO: 1200 - protein, 126 aa, synthetic construct
EVQLVESGGGVVQPGGSLRLSCAAPGDTFSQNDIGWFRQAPGKEREFVAAIKWPGAETYYRDKVKGRFTLSRDNAKNTVYLQMNSLRPEDTALYYCAVKIFSRTGTYSASWEYDFWGQGTLVTVSS

SEQ ID NO: 1201 - protein, 126 aa, synthetic construct
EVQLVESGGGVVQPGGSLRLSCAAPGDTFSQNDIGWFRQAPGKEREFVAAIKWPGAETYYRDKVKGRFTLSRDNAKNTVYLQMNSLRPEDTALYYCAQKIFSTTGTYSASWEYDFWGQGTLVTVSS

SEQ ID NO: 1202 - protein, 126 aa, synthetic construct
EVQLVESGGGVVQPGGSLRLSCAAPGDTFSENDIGWFRQAPGKEREFVAAIVWPGAETGYKDKVKGRFTLSRDNAKNTVYLQMNSLRPEDTALYYCAQKIFSTTGTYSASWEYDFWGQGTLVTVSS

SEQ ID NO: 1203 - protein, 126 aa, synthetic construct
EVQLVESGGGVVQPGGSLRLSCAAPGDTFSQNDIGWFRQAPGKEREFVAAIKWPGGETGYKDKVKGRFTLSRDNAKNTVYLQMNSLRPEDTALYYCAQKIFSTTGTYSASWEYDFWGQGTLVTVSS

SEQ ID NO: 1204 - protein, 126 aa, synthetic construct
EVQLVESGGGVVQPGGSLRLSCAAPGDTFSENDIGWFRQAPGKEREFVAAIKWPGGETGYKDKVKGRFTLSRDNAKNTVYLQMNSLRPEDTALYYCAQKIFSTTGTYSASWEYDFWGQGTLVTVSS

SEQ ID NO: 1205 - protein, 126 aa, synthetic construct
EVQLVESGGGVVQPGGSLRLSCAAPGDTFSQNDIGWFRQAPGKEREFVAAIVWPGGETGYKDKVKGRFTLSRDNAKNTVYLQMNSLRPEDTALYYCAQKIFSTTGTYSASWEYDFWGQGTLVTVSS

SEQ ID NO: 1206 - protein, 126 aa, synthetic construct
EVQLVESGGGVVQPGGSLRLSCAAPGDTFSENDIGWFRQAPGKEREFVAAIVWPGGETGYKDKVKGRFTLSRDNAKNTVYLQMNSLRPEDTALYYCAQKIFSTTGTYSASWEYDFWGQGTLVTVSS

SEQ ID NO: 1207 - protein, 126 aa, synthetic construct
EVQLVESGGGVVQPGGSLRLSCAAPGDTFSENDIGWFRQAPGKEREFVAAIVWPGAETGYRDKVKGRFTLSRDNAKNTVYLQMNSLRPEDTALYYCAQKIFSTTGTYSASWEYDFWGQGTLVTVSS

SEQ ID NO: 1208 - protein, 126 aa, synthetic construct
EVQLVESGGGVVQPGGSLRLSCAAPGDTFSQNDIGWFRQAPGKEREFVAAIKWPGGETGYRDKVKGRFTLSRDNAKNTVYLQMNSLRPEDTALYYCAQKIFSTTGTYSASWEYDFWGQGTLVTVSS

SEQ ID NO: 1209 - protein, 126 aa, synthetic construct
EVQLVESGGGVVQPGGSLRLSCAAPGDTFSQNDIGWFRQAPGKEREFVAAIVWPGGETGYRDKVKGRFTLSRDNAKNTVYLQMNSLRPEDTALYYCAQKIFSTTGTYSASWEYDFWGQGTLVTVSS

SEQ ID NO: 1210 - protein, 126 aa, synthetic construct
EVQLVESGGGVVQPGGSLRLSCAAPGDTFSENDIGWFRQAPGKEREFVAAIKWPGGETYYKDKVKGRFTLSRDNAKNTVYLQMNSLRPEDTALYYCAQKIFSTTGTYSASWEYDFWGQGTLVTVSS

SEQ ID NO: 1211 - protein, 126 aa, synthetic construct
EVQLVESGGGVVQPGGSLRLSCAAPGDTFSQNDIGWFRQAPGKEREFVAAIVWPGGETYYKDKVKGRFTLSRDNAKNTVYLQMNSLRPEDTALYYCAQKIFSTTGTYSASWEYDFWGQGTLVTVSS

SEQ ID NO: 1212 - protein, 126 aa, synthetic construct
EVQLVESGGGVVQPGGSLRLSCAAPGDTFSENDIGWFRQAPGKEREFVAAIVWPGGETYYKDKVKGRFTLSRDNAKNTVYLQMNSLRPEDTALYYCAQKIFSTTGTYSASWEYDFWGQGTLVTVSS

SEQ ID NO: 1213 - protein, 126 aa, synthetic construct
EVQLVESGGGVVQPGGSLRLSCAAPGDTFSQNDIGWFRQAPGKEREFVAAIKWPGAETGYRDKVKGRFTLSRDNAKNTVYLQMNSLRPEDTALYYCAQKIFSTTGTYSASWEYDFWGQGTLVTVSS

SEQ ID NO: 1214 - protein, 126 aa, synthetic construct
EVQLVESGGGVVQPGGSLRLSCAAPGDTFSENDIGWFRQAPGKEREFVAAIKWPGAETGYRDKVKGRFTLSRDNAKNTVYLQMNSLRPEDTALYYCAQKIFSTTGTYSASWEYDFWGQGTLVTVSS

SEQ ID NO: 1215 - protein, 126 aa, synthetic construct
EVQLVESGGGVVQPGGSLRLSCAAPGDTFSQNDIGWFRQAPGKEREFVAAIVWPGAETYYKDKVKGRFTLSRDNAKNTVYLQMNSLRPEDTALYYCAQKIFSTTGTYSASWEYDFWGQGTLVTVSS

SEQ ID NO: 1216 - protein, 126 aa, synthetic construct
EVQLVESGGGVVQPGGSLRLSCAAPGDTFSQNDIGWFRQAPGKEREFVAAIVWPGAETGYRDKVKGRFTLSRDNAKNTVYLQMNSLRPEDTALYYCAQKIFSTTGTYSASWEYDFWGQGTLVTVSS

SEQ ID NO: 1217 - protein, 126 aa, synthetic construct
EVQLVESGGGVVQPGGSLRLSCAAPGDTFSQNDIGWFRQAPGKEREFVAAIVWPGAETGYKDKVKGRFTLSRDNAKNTVYLQMNSLRPEDTALYYCAQKIFSTTGTYSASWEYDFWGQGTLVTVSS

SEQ ID NO: 1218 - protein, 126 aa, synthetic construct
EVQLVESGGGVVQPGGSLRLSCAAPGDTFSENDIGWFRQAPGKEREFVAAIVWPGGETGYRDKVKGRFTLSRDNAKNTVYLQMNSLRPEDTALYYCAVKIFSRTGTYSASWEYDFWGQGTLVTVSS

SEQ ID NO: 1219 - protein, 126 aa, synthetic construct
EVQLVESGGGVVQPGGSLRLSCAAPGDTFSQNDIGWFRQAPGKEREFVAAIKWPGAETGYKDAVKGRFTLSRDNAKNTVYLQMNSLRPEDTALYYCAVKIFSRTGTYSASWEYDFWGQGTLVTVSS

SEQ ID NO: 1220 - protein, 126 aa, synthetic construct
EVQLVESGGGVVQPGGSLRLSCAAPGDTFSENDIGWFRQAPGKEREFVAAIVWPGGETGYKDAVKGRFTLSRDNAKNTVYLQMNSLRPEDTALYYCAVKIFSRTGTYSASWEYDFWGQGTLVTVSS

SEQ ID NO: 1221 - protein, 126 aa, synthetic construct
EVQLVESGGGVVQPGGSLRLSCAAPGDTFSENDIGWFRQAPGKEREFVAAIVWPGGETYYRDKVKGRFTLSRDNAKNTVYLQMNSLRPEDTALYYCAQKIFSRTGTYSASWEYDFWGQGTLVTVSS

SEQ ID NO: 1222 - protein, 126 aa, synthetic construct
EVQLVESGGGVVQPGGSLRLSCAAPGDTFSENDIGWFRQAPGKEREFVAAIKWPGAETGYKDAVKGRFTLSRDNAKNTVYLQMNSLRPEDTALYYCAVKIFSRTGTYSASWEYDFWGQGTLVTVSS

SEQ ID NO: 1223 - protein, 126 aa, synthetic construct
EVQLVESGGGVVQPGGSLRLSCAAPGDTFSQNDIGWFRQAPGKEREFVAAIVWPGAETGYKDAVKGRFTLSRDNAKNTVYLQMNSLRPEDTALYYCAVKIFSRTGTYSASWEYDFWGQGTLVTVSS

SEQ ID NO: 1224 - protein, 126 aa, synthetic construct
EVQLVESGGGVVQPGGSLRLSCAAPGDTFSENDIGWFRQAPGKEREFVAAIVWPGAETGYKDAVKGRFTLSRDNAKNTVYLQMNSLRPEDTALYYCAVKIFSRTGTYSASWEYDFWGQGTLVTVSS

SEQ ID NO: 1225 - protein, 126 aa, synthetic construct
EVQLVESGGGVVQPGGSLRLSCAAPGDTFSENDIGWFRQAPGKEREFVAAIKWPGGETGYKDAVKGRFTLSRDNAKNTVYLQMNSLRPEDTALYYCAVKIFSRTGTYSASWEYDFWGQGTLVTVSS

SEQ ID NO: 1226 - protein, 126 aa, synthetic construct
EVQLVESGGGVVQPGGSLRLSCAAPGDTFSQNDIGWFRQAPGKEREFVAAIVWPGGETGYKDAVKGRFTLSRDNAKNTVYLQMNSLRPEDTALYYCAVKIFSRTGTYSASWEYDFWGQGTLVTVSS

SEQ ID NO: 1227 - protein, 126 aa, synthetic construct
EVQLVESGGGVVQPGGSLRLSCAAPGDTFSQNDIGWFRQAPGKEREFVAAIKWPGGETYYRDKVKGRFTLSRDNAKNTVYLQMNSLRPEDTALYYCAQKIFSRTGTYSASWEYDFWGQGTLVTVSS

SEQ ID NO: 1228 - protein, 126 aa, synthetic construct
EVQLVESGGGVVQPGGSLRLSCAAPGDTFSQNDIGWFRQAPGKEREFVAAIVWPGGETYYRDKVKGRFTLSRDNAKNTVYLQMNSLRPEDTALYYCAQKIFSRTGTYSASWEYDFWGQGTLVTVSS

SEQ ID NO: 1229 - protein, 126 aa, synthetic construct
EVQLVESGGGVVQPGGSLRLSCAAPGDTFSQNDIGWFRQAPGKEREFVAAIKWPGAETYYKDAVKGRFTLSRDNAKNTVYLQMNSLRPEDTALYYCAVKIFSRTGTYSASWEYDFWGQGTLVTVSS

SEQ ID NO: 1230 - protein, 126 aa, synthetic construct
EVQLVESGGGVVQPGGSLRLSCAAPGDTFSENDIGWFRQAPGKEREFVAAIVWPGAETYYKDAVKGRFTLSRDNAKNTVYLQMNSLRPEDTALYYCAVKIFSRTGTYSASWEYDFWGQGTLVTVSS

SEQ ID NO: 1231 - protein, 126 aa, synthetic construct
EVQLVESGGGVVQPGGSLRLSCAAPGDTFSQNDIGWFRQAPGKEREFVAAIKWPGGETYYKDAVKGRFTLSRDNAKNTVYLQMNSLRPEDTALYYCAVKIFSRTGTYSASWEYDFWGQGTLVTVSS

SEQ ID NO: 1232 - protein, 126 aa, synthetic construct
EVQLVESGGGVVQPGGSLRLSCAAPGDTFSENDIGWFRQAPGKEREFVAAIKWPGGETYYKDAVKGRFTLSRDNAKNTVYLQMNSLRPEDTALYYCAVKIFSRTGTYSASWEYDFWGQGTLVTVSS

SEQ ID NO: 1233 - protein, 126 aa, synthetic construct
EVQLVESGGGVVQPGGSLRLSCAAPGDTFSQNDIGWFRQAPGKEREFVAAIVWPGGETYYKDAVKGRFTLSRDNAKNTVYLQMNSLRPEDTALYYCAVKIFSRTGTYSASWEYDFWGQGTLVTVSS

SEQ ID NO: 1234 - protein, 126 aa, synthetic construct
EVQLVESGGGVVQPGGSLRLSCAAPGDTFSENDIGWFRQAPGKEREFVAAIVWPGGETYYKDAVKGRFTLSRDNAKNTVYLQMNSLRPEDTALYYCAVKIFSRTGTYSASWEYDFWGQGTLVTVSS

SEQ ID NO: 1235 - protein, 126 aa, synthetic construct
EVQLVESGGGVVQPGGSLRLSCAAPGDTFSQNDIGWFRQAPGKEREFVAAIKWPGAETGYRDAVKGRFTLSRDNAKNTVYLQMNSLRPEDTALYYCAVKIFSRTGTYSASWEYDFWGQGTLVTVSS

SEQ ID NO: 1236 - protein, 126 aa, synthetic construct
EVQLVESGGGVVQPGGSLRLSCAAPGDTFSQNDIGWFRQAPGKEREFVAAIVWPGAETYYKDAVKGRFTLSRDNAKNTVYLQMNSLRPEDTALYYCAVKIFSRTGTYSASWEYDFWGQGTLVTVSS

SEQ ID NO: 1237 - protein, 126 aa, synthetic construct
EVQLVESGGGVVQPGGSLRLSCAAPGDTFSENDIGWFRQAPGKEREFVAAIKWPGAETGYRDAVKGRFTLSRDNAKNTVYLQMNSLRPEDTALYYCAVKIFSRTGTYSASWEYDFWGQGTLVTVSS

SEQ ID NO: 1238 - protein, 126 aa, synthetic construct
EVQLVESGGGVVQPGGSLRLSCAAPGDTFSQNDIGWFRQAPGKEREFVAAIVWPGAETGYRDAVKGRFTLSRDNAKNTVYLQMNSLRPEDTALYYCAVKIFSRTGTYSASWEYDFWGQGTLVTVSS

SEQ ID NO: 1239 - protein, 126 aa, synthetic construct
EVQLVESGGGVVQPGGSLRLSCAAPGDTFSENDIGWFRQAPGKEREFVAAIVWPGGETYYKDKVKGRFTLSRDNAKNTVYLQMNSLRPEDTALYYCAQKIFSRTGTYSASWEYDFWGQGTLVTVSS

SEQ ID NO: 1240 - protein, 126 aa, synthetic construct
EVQLVESGGGVVQPGGSLRLSCAAPGDTFSQNDIGWFRQAPGKEREFVAAIKWPGAETGYRDKVKGRFTLSRDNAKNTVYLQMNSLRPEDTALYYCAQKIFSRTGTYSASWEYDFWGQGTLVTVSS

SEQ ID NO: 1241 - protein, 126 aa, synthetic construct
EVQLVESGGGVVQPGGSLRLSCAAPGDTFSENDIGWFRQAPGKEREFVAAIKWPGAETGYRDKVKGRFTLSRDNAKNTVYLQMNSLRPEDTALYYCAQKIFSRTGTYSASWEYDFWGQGTLVTVSS

SEQ ID NO: 1242 - protein, 126 aa, synthetic construct
EVQLVESGGGVVQPGGSLRLSCAAPGDTFSQNDIGWFRQAPGKEREFVAAIVWPGAETGYRDKVKGRFTLSRDNAKNTVYLQMNSLRPEDTALYYCAQKIFSRTGTYSASWEYDFWGQGTLVTVSS

SEQ ID NO: 1243 - protein, 126 aa, synthetic construct
EVQLVESGGGVVQPGGSLRLSCAAPGDTFSENDIGWFRQAPGKEREFVAAIKWPGGETYYRDKVKGRFTLSRDNAKNTVYLQMNSLRPEDTALYYCAQKIFSRTGTYSASWEYDFWGQGTLVTVSS

SEQ ID NO: 1244 - protein, 126 aa, synthetic construct
EVQLVESGGGVVQPGGSLRLSCAAPGDTFSENDIGWFRQAPGKEREFVAAIKWPGGETYYKDKVKGRFTLSRDNAKNTVYLQMNSLRPEDTALYYCAQKIFSRTGTYSASWEYDFWGQGTLVTVSS

SEQ ID NO: 1245 - protein, 126 aa, synthetic construct
EVQLVESGGGVVQPGGSLRLSCAAPGDTFSQNDIGWFRQAPGKEREFVAAIVWPGGETYYKDKVKGRFTLSRDNAKNTVYLQMNSLRPEDTALYYCAQKIFSRTGTYSASWEYDFWGQGTLVTVSS

SEQ ID NO: 1246 - protein, 126 aa, synthetic construct
EVQLVESGGGVVQPGGSLRLSCAAPGDTFSENDIGWFRQAPGKEREFVAAIVWPGAETGYRDKVKGRFTLSRDNAKNTVYLQMNSLRPEDTALYYCAQKIFSRTGTYSASWEYDFWGQGTLVTVSS

SEQ ID NO: 1247 - protein, 126 aa, synthetic construct
EVQLVESGGGVVQPGGSLRLSCAAPGDTFSENDIGWFRQAPGKEREFVAAIVWPGGETGYRDKVKGRFTLSRDNAKNTVYLQMNSLRPEDTALYYCAQKIFSRTGTYSASWEYDFWGQGTLVTVSS

SEQ ID NO: 1248 - protein, 126 aa, synthetic construct
EVQLVESGGGVVQPGGSLRLSCAAPGDTFSQNDIGWFRQAPGKEREFVAAIKWPGAETYYRDKVKGRFTLSRDNAKNTVYLQMNSLRPEDTALYYCAQKIFSRTGTYSASWEYDFWGQGTLVTVSS

SEQ ID NO: 1249 - protein, 126 aa, synthetic construct
EVQLVESGGGVVQPGGSLRLSCAAPGDTFSQNDIGWFRQAPGKEREFVAAIVWPGAETYYRDKVKGRFTLSRDNAKNTVYLQMNSLRPEDTALYYCAQKIFSRTGTYSASWEYDFWGQGTLVTVSS

SEQ ID NO: 1250 - protein, 126 aa, synthetic construct
EVQLVESGGGVVQPGGSLRLSCAAPGDTFSENDIGWFRQAPGKEREFVAAIVWPGAETYYRDKVKGRFTLSRDNAKNTVYLQMNSLRPEDTALYYCAQKIFSRTGTYSASWEYDFWGQGTLVTVSS

SEQ ID NO: 1251 - protein, 126 aa, synthetic construct
EVQLVESGGGVVQPGGSLRLSCAAPGDTFSQNDIGWFRQAPGKEREFVAAIKWPGGETGYRDKVKGRFTLSRDNAKNTVYLQMNSLRPEDTALYYCAQKIFSRTGTYSASWEYDFWGQGTLVTVSS

SEQ ID NO: 1252 - protein, 126 aa, synthetic construct
EVQLVESGGGVVQPGGSLRLSCAAPGDTFSENDIGWFRQAPGKEREFVAAIKWPGGETGYRDKVKGRFTLSRDNAKNTVYLQMNSLRPEDTALYYCAQKIFSRTGTYSASWEYDFWGQGTLVTVSS

SEQ ID NO: 1253 - protein, 126 aa, synthetic construct
EVQLVESGGGVVQPGGSLRLSCAAPGDTFSQNDIGWFRQAPGKEREFVAAIVWPGGETGYRDKVKGRFTLSRDNAKNTVYLQMNSLRPEDTALYYCAQKIFSRTGTYSASWEYDFWGQGTLVTVSS

SEQ ID NO: 1254 - protein, 126 aa, synthetic construct
EVQLVESGGGVVQPGGSLRLSCAAPGDTFSENDIGWFRQAPGKEREFVAAIVWPGAETGYRDAVKGRFTLSRDNAKNTVYLQMNSLRPEDTALYYCAVKIFSRTGTYSASWEYDFWGQGTLVTVSS

SEQ ID NO: 1255 - protein, 126 aa, synthetic construct
EVQLVESGGGVVQPGGSLRLSCAAPGDTFSENDIGWFRQAPGKEREFVAAIKWPGAETYYKDKVKGRFTLSRDNAKNTVYLQMNSLRPEDTALYYCAVKIFSRTGTYSASWEYDFWGQGTLVTVSS

SEQ ID NO: 1256 - protein, 126 aa, synthetic construct
EVQLVESGGGVVQPGGSLRLSCAAPGDTFSENDIGWFRQAPGKEREFVAAIVWPGAETYYKDKVKGRFTLSRDNAKNTVYLQMNSLRPEDTALYYCAVKIFSRTGTYSASWEYDFWGQGTLVTVSS

SEQ ID NO: 1257 - protein, 126 aa, synthetic construct
EVQLVESGGGVVQPGGSLRLSCAAPGDTFSENDIGWFRQAPGKEREFVAAIKWPGGETYYKDKVKGRFTLSRDNAKNTVYLQMNSLRPEDTALYYCAVKIFSRTGTYSASWEYDFWGQGTLVTVSS

SEQ ID NO: 1258 - protein, 126 aa, synthetic construct
EVQLVESGGGVVQPGGSLRLSCAAPGDTFSQNDIGWFRQAPGKEREFVAAIVWPGGETYYKDKVKGRFTLSRDNAKNTVYLQMNSLRPEDTALYYCAVKIFSRTGTYSASWEYDFWGQGTLVTVSS

SEQ ID NO: 1259 - protein, 126 aa, synthetic construct
EVQLVESGGGVVQPGGSLRLSCAAPGDTFSQNDIGWFRQAPGKEREFVAAIKWPGAETYYKDKVKGRFTLSRDNAKNTVYLQMNSLRPEDTALYYCAVKIFSRTGTYSASWEYDFWGQGTLVTVSS

SEQ ID NO: 1260 - protein, 126 aa, synthetic construct
EVQLVESGGGVVQPGGSLRLSCAAPGDTFSENDIGWFRQAPGKEREFVAAIVWPGGETYYKDKVKGRFTLSRDNAKNTVYLQMNSLRPEDTALYYCAVKIFSRTGTYSASWEYDFWGQGTLVTVSS

SEQ ID NO: 1261 - protein, 126 aa, synthetic construct
EVQLVESGGGVVQPGGSLRLSCAAPGDTFSENDIGWFRQAPGKEREFVAAIKWPGAETGYRDKVKGRFTLSRDNAKNTVYLQMNSLRPEDTALYYCAVKIFSRTGTYSASWEYDFWGQGTLVTVSS

SEQ ID NO: 1262 - protein, 126 aa, synthetic construct
EVQLVESGGGVVQPGGSLRLSCAAPGDTFSQNDIGWFRQAPGKEREFVAAIVWPGAETGYRDKVKGRFTLSRDNAKNTVYLQMNSLRPEDTALYYCAVKIFSRTGTYSASWEYDFWGQGTLVTVSS

SEQ ID NO: 1263 - protein, 126 aa, synthetic construct
EVQLVESGGGVVQPGGSLRLSCAAPGDTFSENDIGWFRQAPGKEREFVAAIVWPGAETGYRDKVKGRFTLSRDNAKNTVYLQMNSLRPEDTALYYCAVKIFSRTGTYSASWEYDFWGQGTLVTVSS

SEQ ID NO: 1264 - protein, 126 aa, synthetic construct
EVQLVESGGGVVQPGGSLRLSCAAPGDTFSQNDIGWFRQAPGKEREFVAAIKWPGGETGYRDKVKGRFTLSRDNAKNTVYLQMNSLRPEDTALYYCAVKIFSRTGTYSASWEYDFWGQGTLVTVSS

SEQ ID NO: 1265 - protein, 126 aa, synthetic construct
EVQLVESGGGVVQPGGSLRLSCAAPGDTFSENDIGWFRQAPGKEREFVAAIKWPGGETGYRDKVKGRFTLSRDNAKNTVYLQMNSLRPEDTALYYCAVKIFSRTGTYSASWEYDFWGQGTLVTVSS

SEQ ID NO: 1266 - protein, 126 aa, synthetic construct
EVQLVESGGGVVQPGGSLRLSCAAPGDTFSQNDIGWFRQAPGKEREFVAAIVWPGGETGYRDKVKGRFTLSRDNAKNTVYLQMNSLRPEDTALYYCAVKIFSRTGTYSASWEYDFWGQGTLVTVSS

SEQ ID NO: 1267 - protein, 126 aa, synthetic construct
EVQLVESGGGVVQPGGSLRLSCAAPGDTFSQNDIGWFRQAPGKEREFVAAIKWPGAETGYRDKVKGRFTLSRDNAKNTVYLQMNSLRPEDTALYYCAVKIFSRTGTYSASWEYDFWGQGTLVTVSS

SEQ ID NO: 1268 - protein, 126 aa, synthetic construct
EVQLVESGGGVVQPGGSLRLSCAAPGDTFSENDIGWFRQAPGKEREFVAAIVWPGGETGYKDKVKGRFTLSRDNAKNTVYLQMNSLRPEDTALYYCAVKIFSRTGTYSASWEYDFWGQGTLVTVSS

SEQ ID NO: 1269 - protein, 126 aa, synthetic construct
EVQLVESGGGVVQPGGSLRLSCAAPGDTFSQNDIGWFRQAPGKEREFVAAIVWPGGETGYKDKVKGRFTLSRDNAKNTVYLQMNSLRPEDTALYYCAVKIFSRTGTYSASWEYDFWGQGTLVTVSS

SEQ ID NO: 1270 - protein, 126 aa, synthetic construct
EVQLVESGGGVVQPGGSLRLSCAAPGDTFSQNDIGWFRQAPGKEREFVAAIVWPGAETYYKDKVKGRFTLSRDNAKNTVYLQMNSLRPEDTALYYCAVKIFSRTGTYSASWEYDFWGQGTLVTVSS

SEQ ID NO: 1271 - protein, 126 aa, synthetic construct
EVQLVESGGGVVQPGGSLRLSCAAPGDTFSENDIGWFRQAPGKEREFVAAIKWPGGETGYKDKVKGRFTLSRDNAKNTVYLQMNSLRPEDTALYYCAVKIFSRTGTYSASWEYDFWGQGTLVTVSS

SEQ ID NO: 1272 - protein, 126 aa, synthetic construct
EVQLVESGGGVVQPGGSLRLSCAAPGDTFSQNDIGWFRQAPGKEREFVAAIKWPGGETYYKDKVKGRFTLSRDNAKNTVYLQMNSLRPEDTALYYCAVKIFSRTGTYSASWEYDFWGQGTLVTVSS

SEQ ID NO: 1273 - protein, 126 aa, synthetic construct
EVQLVESGGGVVQPGGSLRLSCAAPGDTFSQNDIGWFRQAPGKEREFVAAIVWPGGETGYRDAVKGRFTLSRDNAKNTVYLQMNSLRPEDTALYYCAVKIFSRTGTYSASWEYDFWGQGTLVTVSS

SEQ ID NO: 1274 - protein, 126 aa, synthetic construct
EVQLVESGGGVVQPGGSLRLSCAAPGDTFSENDIGWFRQAPGKEREFVAAIVWPGGETGYRDAVKGRFTLSRDNAKNTVYLQMNSLRPEDTALYYCAVKIFSRTGTYSASWEYDFWGQGTLVTVSS

SEQ ID NO: 1275 - protein, 126 aa, synthetic construct
EVQLVESGGGVVQPGGSLRLSCAAPGDTFSENDIGWFRQAPGKEREFVAAIKWPGGETGYRDAVKGRFTLSRDNAKNTVYLQMNSLRPEDTALYYCAVKIFSRTGTYSASWEYDFWGQGTLVTVSS

SEQ ID NO: 1276 - protein, 126 aa, synthetic construct
EVQLVESGGGVVQPGGSLRLSCAAPGDTFSQNDIGWFRQAPGKEREFVAAIKWPGAETYYRDAVKGRFTLSRDNAKNTVYLQMNSLRPEDTALYYCAVKIFSRTGTYSASWEYDFWGQGTLVTVSS

SEQ ID NO: 1277 - protein, 126 aa, synthetic construct
EVQLVESGGGVVQPGGSLRLSCAAPGDTFSENDIGWFRQAPGKEREFVAAIKWPGAETYYRDAVKGRFTLSRDNAKNTVYLQMNSLRPEDTALYYCAVKIFSRTGTYSASWEYDFWGQGTLVTVSS

SEQ ID NO: 1278 - protein, 126 aa, synthetic construct
EVQLVESGGGVVQPGGSLRLSCAAPGDTFSQNDIGWFRQAPGKEREFVAAIVWPGAETYYRDAVKGRFTLSRDNAKNTVYLQMNSLRPEDTALYYCAVKIFSRTGTYSASWEYDFWGQGTLVTVSS

SEQ ID NO: 1279 - protein, 126 aa, synthetic construct
EVQLVESGGGVVQPGGSLRLSCAAPGDTFSENDIGWFRQAPGKEREFVAAIVWPGAETYYRDAVKGRFTLSRDNAKNTVYLQMNSLRPEDTALYYCAVKIFSRTGTYSASWEYDFWGQGTLVTVSS

SEQ ID NO: 1280 - protein, 126 aa, synthetic construct
EVQLVESGGGVVQPGGSLRLSCAAPGDTFSQNDIGWFRQAPGKEREFVAAIKWPGGETYYRDAVKGRFTLSRDNAKNTVYLQMNSLRPEDTALYYCAVKIFSRTGTYSASWEYDFWGQGTLVTVSS

SEQ ID NO: 1281 - protein, 126 aa, synthetic construct
EVQLVESGGGVVQPGGSLRLSCAAPGDTFSQNDIGWFRQAPGKEREFVAAIVWPGGETYYRDAVKGRFTLSRDNAKNTVYLQMNSLRPEDTALYYCAVKIFSRTGTYSASWEYDFWGQGTLVTVSS

SEQ ID NO: 1282 - protein, 126 aa, synthetic construct
EVQLVESGGGVVQPGGSLRLSCAAPGDTFSENDIGWFRQAPGKEREFVAAIVWPGGETYYRDAVKGRFTLSRDNAKNTVYLQMNSLRPEDTALYYCAVKIFSRTGTYSASWEYDFWGQGTLVTVSS

SEQ ID NO: 1283 - protein, 126 aa, synthetic construct
EVQLVESGGGVVQPGGSLRLSCAAPGDTFSENDIGWFRQAPGKEREFVAAIKWPGGETYYRDAVKGRFTLSRDNAKNTVYLQMNSLRPEDTALYYCAVKIFSRTGTYSASWEYDFWGQGTLVTVSS

SEQ ID NO: 1284 - protein, 126 aa, synthetic construct
EVQLVESGGGVVQPGGSLRLSCAAPGDTFSQNDIGWFRQAPGKEREFVAAIKWPGAETGYKDKVKGRFTLSRDNAKNTVYLQMNSLRPEDTALYYCAVKIFSRTGTYSASWEYDFWGQGTLVTVSS

SEQ ID NO: 1285 - protein, 126 aa, synthetic construct
EVQLVESGGGVVQPGGSLRLSCAAPGDTFSENDIGWFRQAPGKEREFVAAIKWPGAETGYKDKVKGRFTLSRDNAKNTVYLQMNSLRPEDTALYYCAVKIFSRTGTYSASWEYDFWGQGTLVTVSS

SEQ ID NO: 1286 - protein, 126 aa, synthetic construct
EVQLVESGGGVVQPGGSLRLSCAAPGDTFSQNDIGWFRQAPGKEREFVAAIVWPGAETGYKDKVKGRFTLSRDNAKNTVYLQMNSLRPEDTALYYCAVKIFSRTGTYSASWEYDFWGQGTLVTVSS

SEQ ID NO: 1287 - protein, 126 aa, synthetic construct
EVQLVESGGGVVQPGGSLRLSCAAPGDTFSQNDIGWFRQAPGKEREFVAAIKWPGGETGYKDKVKGRFTLSRDNAKNTVYLQMNSLRPEDTALYYCAVKIFSRTGTYSASWEYDFWGQGTLVTVSS

SEQ ID NO: 1288 - protein, 126 aa, synthetic construct
EVQLVESGGGVVQPGGSLRLSCAAPGDTFSENDIGWFRQAPGKEREFVAAIVWPGAETYYKDKVKGRFTLSRDNAKNTVYLQMNSLRPEDTALYYCAQKIFSRTGTYSASWEYDFWGQGTLVTVSS

SEQ ID NO: 1289 - protein, 126 aa, synthetic construct
EVQLVESGGGVVQPGGSLRLSCAAPGDTFSQNDIGWFRQAPGKEREFVAAIVWPGGETGYKDAVKGRFTLSRDNAKNTVYLQMNSLRPEDTALYYCAVKIFSTTGTYSASWEYDFWGQGTLVTVSS

SEQ ID NO: 1290 - protein, 126 aa, synthetic construct
EVQLVESGGGVVQPGGSLRLSCAAPGDTFSENDIGWFRQAPGKEREFVAAIVWPGAETGYRDAVKGRFTLSRDNAKNTVYLQMNSLRPEDTALYYCAQKIFSTTGTYSASWEYDFWGQGTLVTVSS

SEQ ID NO: 1291 - protein, 126 aa, synthetic construct
EVQLVESGGGVVQPGGSLRLSCAAPGDTFSENDIGWFRQTPGKEREFVAAIVWPGGETYYRDSVKGRFTLSRDNAKNTVYLQMNSLRPEDTALYSCAVKIFSKTGTYSKSWEYDFWGQGTLVTVSS

SEQ ID NO: 1292 - protein, 126 aa, synthetic construct
EVQLVESGGGVVQPGGSLRLSCAAPGDTFSENDIGWFRQTPGKEREFVAAIVWPGGETYYRDSVKGRFTLSRDNAKNTVYLQMNSLRPEDTALYSCAVKIFSKTGTYSTSWEYDFWGQGTLVTVSS

SEQ ID NO: 1293 - protein, 126 aa, synthetic construct
EVQLVESGGGVVQPGGSLRLSCAAPGDTFSENDIGWFRQTPGKEREFVAAIVWPGGETYYRDSVKGRFTLSRDNAKNTVYLQMNSLRPEDTALYSCAVKIFSKTGTYSPSWEYDFWGQGTLVTVSS

SEQ ID NO: 1294 - protein, 126 aa, synthetic construct
EVQLVESGGGVVQPGGSLRLSCAAPGDTFSENDIGWFRQTPGKEREFVAPIVWPGGETYYRDSVKGRFTLSRDNAKNTVYLQMNSLRPEDTALYSCAVKIFSKTGTYSASWEYDFWGQGTLVTVSS

SEQ ID NO: 1295 - protein, 126 aa, synthetic construct
EVQLVESGGGVVQPGGSLRLSCAAPGDTFSENDIAWFRQTPGKEREFVAAIVWPGGETYYRDSVKGRFTLSRDNAKNTVYLQMNSLRPEDTALYSCAVKIFSKTGTYSASWEYDFWGQGTLVTVSS

SEQ ID NO: 1296 - protein, 126 aa, synthetic construct
EVQLVESGGGVVQPGGSLRLSCAAPGDTFSENDILWFRQTPGKEREFVAAIVWPGGETYYRDSVKGRFTLSRDNAKNTVYLQMNSLRPEDTALYSCALKIFSKTGTYSASWEYDFWGQGTLVTVSS

SEQ ID NO: 1297 - protein, 126 aa, synthetic construct
EVQLVESGGGVVQPGGSLRLSCAAPGDTFSENDISWFRQTPGKEREFVAAIVWPGGETYYRDSVKGRFTLSRDNAKNTVYLQMNSLRPEDTALYSCAVKIFSKTGTYSASWEYDFWGQGTLVTVSS

SEQ ID NO: 1298 - protein, 126 aa, synthetic construct
EVQLVESGGGVVQPGGSLRLSCAAPGDTFSENDIRWFRQTPGKEREFVAAIVWPGGETYYRDSVKGRFTLSRDNAKNTVYLQMNSLRPEDTALYSCAVKIFSKTGTYSASWEYDFWGQGTLVTVSS

SEQ ID NO: 1299 - protein, 126 aa, synthetic construct
EVQLVESGGGVVQPGGSLRLSCAAPGDTFSENDIHWFRQTPGKEREFVAAIVWPGGETYYRDSVKGRFTLSRDNAKNTVYLQMNSLRPEDTALYSCAVKIFSKTGTYSASWEYDFWGQGTLVTVSS

SEQ ID NO: 1300 - protein, 126 aa, synthetic construct
EVQLVESGGGVVQPGGSLRLSCAAPGDTFSENDIGWFRQTPGKEREFVAAKVWPGGETYYRDSVKGRFTLSRDNAKNTVYLQMNSLRPEDTALYSCAVKIFSKTGTYSASWEYDFWGQGTLVTVSS

SEQ ID NO: 1301 - protein, 126 aa, synthetic construct
EVQLVESGGGVVQPGGSLRLSCAAPGDTFSENDIVWFRQTPGKEREFVAAIVWPGGETYYRDSVKGRFTLSRDNAKNTVYLQMNSLRPEDTALYSCAVKIFSKTGTYSASWEYDFWGQGTLVTVSS

SEQ ID NO: 1302 - protein, 126 aa, synthetic construct
EVQLVESGGGVVQPGGSLRLSCAAPGDTFSENDILWFRQTPGKEREFVAAIVWPGGETYYRDSVKGRFTLSRDNAKNTVYLQMNSLRPEDTALYSCAVKIFSKTGTYSASWEYDFWGQGTLVTVSS

SEQ ID NO: 1303 - protein, 126 aa, synthetic construct
EVQLVESGGGVVQPGGSLRLSCAAPGDTFSENDIPWFRQTPGKEREFVAAIVWPGGETYYRDSVKGRFTLSRDNAKNTVYLQMNSLRPEDTALYSCAVKIFSKTGTYSASWEYDFWGQGTLVTVSS

SEQ ID NO: 1304 - protein, 126 aa, synthetic construct
EVQLVESGGGVVQPGGSLRLSCAAPGDTFSENDIQWFRQTPGKEREFVAAIVWPGGETYYRDSVKGRFTLSRDNAKNTVYLQMNSLRPEDTALYSCAVKIFSKTGTYSASWEYDFWGQGTLVTVSS

SEQ ID NO: 1305 - protein, 126 aa, synthetic construct
EVQLVESGGGVVQPGGSLRLSCAAPGDTFSENDIEWFRQTPGKEREFVAAIVWPGGETYYRDSVKGRFTLSRDNAKNTVYLQMNSLRPEDTALYSCAVKIFSKTGTYSASWEYDFWGQGTLVTVSS

SEQ ID NO: 1306 - protein, 126 aa, synthetic construct
EVQLVESGGGVVQPGGSLRLSCAAPGDTFSENDIIWFRQTPGKEREFVAAIVWPGGETYYRDSVKGRFTLSRDNAKNTVYLQMNSLRPEDTALYSCAVKIFSKTGTYSASWEYDFWGQGTLVTVSS

SEQ ID NO: 1307 - protein, 126 aa, synthetic construct
EVQLVESGGGVVQPGGSLRLSCAAPGDTFSENDIDWFRQTPGKEREFVAAIVWPGGETYYRDSVKGRFTLSRDNAKNTVYLQMNSLRPEDTALYSCAVKIFSKTGTYSASWEYDFWGQGTLVTVSS

SEQ ID NO: 1308 - protein, 126 aa, synthetic construct
EVQLVESGGGVVQPGGSLRLSCAAPGDTFSENDIYWFRQTPGKEREFVAAIVWPGGETYYRDSVKGRFTLSRDNAKNTVYLQMNSLRPEDTALYSCAVKIFSKTGTYSASWEYDFWGQGTLVTVSS

SEQ ID NO: 1309 - protein, 126 aa, synthetic construct
EVQLVESGGGVVQPGGSLRLSCAAPGDTFSENDIKWFRQTPGKEREFVAAIVWPGGETYYRDSVKGRFTLSRDNAKNTVYLQMNSLRPEDTALYSCAVKIFSKTGTYSASWEYDFWGQGTLVTVSS

SEQ ID NO: 1310 - protein, 126 aa, synthetic construct
EVQLVESGGGVVQPGGSLRLSCAAPGDTFSENDIGWFRQTPGKEREFVAFIVWPGGETYYRDSVKGRFTLSRDNAKNTVYLQMNSLRPEDTALYSCAVKIFSKTGTYSASWEYDFWGQGTLVTVSS

SEQ ID NO: 1311 - protein, 126 aa, synthetic construct
EVQLVESGGGVVQPGGSLRLSCAAPGDTFSENDIGWFRQTPGKEREFVAVIVWPGGETYYRDSVKGRFTLSRDNAKNTVYLQMNSLRPEDTALYSCAVKIFSKTGTYSASWEYDFWGQGTLVTVSS

SEQ ID NO: 1312 - protein, 126 aa, synthetic construct
EVQLVESGGGVVQPGGSLRLSCAAPGDTFSENDIGWFRQTPGKEREFVAIIVWPGGETYYRDSVKGRFTLSRDNAKNTVYLQMNSLRPEDTALYSCAVKIFSKTGTYSASWEYDFWGQGTLVTVSS

SEQ ID NO: 1313 - protein, 126 aa, synthetic construct
EVQLVESGGGVVQPGGSLRLSCAAPGDTFSENDIGWFRQTPGKEREFVAAGVWPGGETYYRDSVKGRFTLSRDNAKNTVYLQMNSLRPEDTALYSCAVKIFSKTGTYSASWEYDFWGQGTLVTVSS

SEQ ID NO: 1314 - protein, 126 aa, synthetic construct
EVQLVESGGGVVQPGGSLRLSCAAPGDTFSENDIGWFRQTPGKEREFVAALVWPGGETYYRDSVKGRFTLSRDNAKNTVYLQMNSLRPEDTALYSCAVKIFSKTGTYSASWEYDFWGQGTLVTVSS

SEQ ID NO: 1315 - protein, 126 aa, synthetic construct
EVQLVESGGGVVQPGGSLRLSCAAPGDTFSENDIGWFRQTPGKEREFVAAPVWPGGETYYRDSVKGRFTLSRDNAKNTVYLQMNSLRPEDTALYSCAVKIFSKTGTYSASWEYDFWGQGTLVTVSS

SEQ ID NO: 1316 - protein, 126 aa, synthetic construct
EVQLVESGGGVVQPGGSLRLSCAAPGDTFSENDIGWFRQTPGKEREFVARIVWPGGETYYRDSVKGRFTLSRDNAKNTVYLQMNSLRPEDTALYSCAVKIFSKTGTYSASWEYDFWGQGTLVTVSS

SEQ ID NO: 1317 - protein, 126 aa, synthetic construct
EVQLVESGGGVVQPGGSLRLSCAAPGDTFSENDIGWFRQTPGKEREFVAQIVWPGGETYYRDSVKGRFTLSRDNAKNTVYLQMNSLRPEDTALYSCAVKIFSKTGTYSASWEYDFWGQGTLVTVSS

SEQ ID NO: 1318 - protein, 126 aa, synthetic construct
EVQLVESGGGVVQPGGSLRLSCAAPGDTFSENDIGWFRQTPGKEREFVAHIVWPGGETYYRDSVKGRFTLSRDNAKNTVYLQMNSLRPEDTALYSCAVKIFSKTGTYSASWEYDFWGQGTLVTVSS

SEQ ID NO: 1319 - protein, 126 aa, synthetic construct
EVQLVESGGGVVQPGGSLRLSCAAPGDTFSENDIGWFRQTPGKEREFVAAHVWPGGETYYRDSVKGRFTLSRDNAKNTVYLQMNSLRPEDTALYSCAVKIFSKTGTYSASWEYDFWGQGTLVTVSS

SEQ ID NO: 1320 - protein, 126 aa, synthetic construct
EVQLVESGGGVVQPGGSLRLSCAAPGDTFSENDIGWFRQTPGKEREFVAGIVWPGGETYYRDSVKGRFTLSRDNAKNTVYLQMNSLRPEDTALYSCAVKIFSKTGTYSASWEYDFWGQGTLVTVSS

SEQ ID NO: 1321 - protein, 126 aa, synthetic construct
EVQLVESGGGVVQPGGSLRLSCAAPGDTFSENDIGRFRQTPGKEREFVAHIVWPGGETYYRDSVKGRFTLSRDNAKNTVYLQMNSLRPEDTALYSCAVKIFSKTGTYSASWEYDFWGQGTLVTVSS

SEQ ID NO: 1322 - protein, 126 aa, synthetic construct
EVQLVESGGGVVQPGGSLRLSCAAPGDTFSENDIGWFRQTPGKEREFVATIVWPGGETYYRDSVKGRFTLSRDNAKNTVYLQMNSLRPEDTALYSCAVKIFSKTGTYSASWEYDFWGQGTLVTVSS

SEQ ID NO: 1323 - protein, 126 aa, synthetic construct
EVQLVESGGGVVQPGGSLRLSCAAPGDTFSENDIGWFRQTPGKEREFVASIVWPGGETYYRDSVKGRFTLSRDNAKNTVYLQMNSLRPEDTALYSCAVKIFSKTGTYSASWEYDFWGQGTLVTVSS

SEQ ID NO: 1324 - protein, 126 aa, synthetic construct
EVQLVESGGGVVQPGGSLRLSCAAPGDTFSENDIGWFRQTPGKEREFVAYIVWPGGETYYRDSVKGRFTLSRDNAKNTVYLQMNSLRPEDTALYSCAVKIFSKTGTYSASWEYDFWGQGTLVTVSS

SEQ ID NO: 1325 - protein, 126 aa, synthetic construct
EVQLVESGGGVVQPGGSLRLSCAAPGDTFSENDIGWFRQTPGKEREFVAKIVWPGGETYYRDSVKGRFTLSRDNAKNTVYLQMNSLRPEDTALYSCAVKIFSKTGTYSASWEYDFWGQGTLVTVSS

SEQ ID NO: 1326 - protein, 126 aa, synthetic construct
EVQLVESGGGVVQPGGSLRLSCAAPGDTFSENDIGWFRQTPGKEREFVAHIVWPGGETYYRDSVKGRFTLSRDNAKNTVYLQMNSLRPEDTALYPCAVKIFSKTGTYSASWEYDFWGQGTLVTVSS

SEQ ID NO: 1327 - protein, 126 aa, synthetic construct
EVQLVESGGGVVQPGGSLRLSCAAPGDTFSENDIGWFRQTPGKEREFVAAIVWKGGETYYRDSVKGRFTLSRDNAKNTVYLQMNSLRPEDTALYSCAVKIFSKTGTYSASWEYDFWGQGTLVTVSS

SEQ ID NO: 1328 - protein, 126 aa, synthetic construct
EVQLVESGGGVVQPGGSLRLSCAAPGDTFSENDIGWFRQTPGKEREFVAAFVWPGGETYYRDSVKGRFTLSRDNAKNTVYLQMNSLRPEDTALYSCAVKIFSKTGTYSASWEYDFWGQGTLVTVSS

SEQ ID NO: 1329 - protein, 126 aa, synthetic construct
EVQLVESGGGVVQPGGSLRLSCAAPGDTFSENDIGWFRQTPGKEREFVAAAVWPGGETYYRDSVKGRFTLSRDNAKNTVYLQMNSLRPEDTALYSCAVKIFSKTGTYSASWEYDFWGQGTLVTVSS

SEQ ID NO: 1330 - protein, 126 aa, synthetic construct
EVQLVESGGGVVQPGGSLRLSCAAPGDTFSENPIGWFRQTPGKEREFVAAIVWPGGETYYRDSVKGRFTLSRDNAKNTVYLQMNSLRPEDTALYSCAVKIFSKTGTYSASWEYDFWGQGTLVTVSS

SEQ ID NO: 1331 - protein, 126 aa, synthetic construct
EVQLVESGGGVVQPGGSLRLSCAAPGDTFSENAIGWFRQTPGKEREFVAAIVWPGGETYYRDSVKGRFTLSRDNAKNTVYLQMNSLRPEDTALYSCAVKIFSKTGTYSASWEYDFWGQGTLVTVSS

SEQ ID NO: 1332 - protein, 126 aa, synthetic construct
EVQLVESGGGVVQPGGSLRLSCAAPGDTFSENTIGWFRQTPGKEREFVAAIVWPGGETYYRDSVKGRFTLSRDNAKNTVYLQMNSLRPEDTALYSCAVKIFSKTGTYSASWEYDFWGQGTLVTVSS

SEQ ID NO: 1333 - protein, 126 aa, synthetic construct
EVQLVESGGGVVQPGGSLRLSCAAPGDTFSENIIGWFRQTPGKEREFVAAIVWPGGETYYRDSVKGRFTLSRDNAKNTVYLQMNSLRPEDTALYSCAVKIFSKTGTYSASWEYDFWGQGTLVTVSS

SEQ ID NO: 1334 - protein, 126 aa, synthetic construct
EVQLVESGGGVVQPGGSLRLSCAAPGDTFSENRIGWFRQTPGKEREFVAAIVWPGGETYYRDSVKGRFTLSRDNAKNTVYLQMNSLRPEDTALYSCAVKIFSKTGTYSASWEYDFWGQGTLVTVSS

SEQ ID NO: 1335 - protein, 126 aa, synthetic construct
EVQLVESGGGVVQPGGSLRLSCAAPGDTFSENVIGWFRQTPGKEREFVAAIVWPGGETYYRDSVKGRFTLSRDNAKNTVYLQMNSLRPEDTALYSCAVKIFSKTGTYSASWEYDFWGQGTLVTVSS

SEQ ID NO: 1336 - protein, 126 aa, synthetic construct
EVQLVESGGGVVQPGGSLRLSCAAPGDTFSENGIGWFRQTPGKEREFVAAIVWPGGETYYRDSVKGRFTLSRDNAKNTVYLQMNSLRPEDTALYSCAVKIFSKTGTYSASWEYDFWGQGTLVTVSS

SEQ ID NO: 1337 - protein, 126 aa, synthetic construct
EVQLVESGGGVVQPGGSLRLSCAAPGDTFSENYIGWFRQTPGKEREFVAAIVWPGGETYYRDSVKGRFTLSRDNAKNTVYLQMNSLRPEDTALYSCAVKIFSKTGTYSASWEYDFWGQGTLVTVSS

SEQ ID NO: 1338 - protein, 126 aa, synthetic construct
EVQLVESGGGVVQPGGSLRLSCAAPGDTFSENDRGWFRQTPGKEREFVAAIVWPGGETYYRDSVKGRFTLSRDNAKNTVYLQMNSLRPEDTALYSCAVKIFSKTGTYSASWEYDFWGQGTLVTVSS

SEQ ID NO: 1339 - protein, 126 aa, synthetic construct
EVQLVESGGGVVQPGGSLRLSCAAPGDTFSENLIGWFRQTPGKEREFVAAIVWPGGETYYRDSVKGRFTLSRDNAKNTVYLQMNSLRPEDTALYSCAVKIFSKTGTYSASWEYDFWGQGTLVTVSS

SEQ ID NO: 1340 - protein, 126 aa, synthetic construct
EVQLVESGGGVVQPGGSLRLSCAAPGDTFSERDIGWFRQTPGKEREFVAAIVWPGGETYYRDSVKGRFTLSRDNAKNTVYLQMNSLRPEDTALYSCAVKIFSKTGTYSASWEYDFWGQGTLVTVSS

SEQ ID NO: 1341 - protein, 126 aa, synthetic construct
EVQLVESGGGVVQPGGSLRLSCAAPGDTFSEQDIGWFRQTPGKEREFVAAIVWPGGETYYRDSVKGRFTLSRDNAKNTVYLQMNSLRPEDTALYSCAVKIFSKTGTYSASWEYDFWGQGTLVTVSS

SEQ ID NO: 1342 - protein, 126 aa, synthetic construct
EVQLVESGGGVVQPGGSLRLSCAAPGDTFSEVDIGWFRQTPGKEREFVAAIVWPGGETYYRDSVKGRFTLSRDNAKNTVYLQMNSLRPEDTALYSCAVKIFSKTGTYSASWEYDFWGQGTLVTVSS

SEQ ID NO: 1343 - protein, 126 aa, synthetic construct
EVQLVESGGGVVQPGGSLRLSCAAPGDTFSEEDIGWFRQTPGKEREFVAAIVWPGGETYYRDSVKGRFTLSRDNAKNTVYLQMNSLRPEDTALYSCAVKIFSKTGTYSASWEYDFWGQGTLVTVSS

SEQ ID NO: 1344 - protein, 126 aa, synthetic construct
EVQLVESGGGVVQPGGSLRLSCAAPGDTFSENDHGWFRQTPGKEREFVAAIVWPGGETYYRDSVKGRFTLSRDNAKNTVYLQMNSLRPEDTALYSCAVKIFSKTGTYSASWEYDFWGQGTLVTVSS

SEQ ID NO: 1345 - protein, 126 aa, synthetic construct
EVQLVESGGGVVQPGGSLRLSCAAPGDTFSENDIGWFRQTPGKEREFVAAVVWPGGETYYRDSVKGRFTLSRDNAKNTVYLQMNSLRPEDTALYSCAVKIFSKTGTYSASWEYDFWGQGTLVTVSS

SEQ ID NO: 1346 - protein, 126 aa, synthetic construct
EVQLVESGGGVVQPGGSLRLSCAAPGDTFSENFIGWFRQTPGKEREFVAAIVWPGGETYYRDSVKGRFTLSRDNAKNTVYLQMNSLRPEDTALYSCAVKIFSKTGTYSASWEYDFWGQGTLVTVSS

SEQ ID NO: 1347 - protein, 126 aa, synthetic construct
EVQLVESGGGVVQPGGSLRLSCAAPGDTFSENDMGWFRQTPGKEREFVAAIVWPGGETYYRDSVKGRFTLSRDNAKNTVYLQMNSLRPEDTALYSCAVKIFSKTGTYSASWEYDFWGQGTLVTVSS

SEQ ID NO: 1348 - protein, 126 aa, synthetic construct
EVQLVESGGGVVQPGGSLRLSCAAPGDTFSENKIGWFRQTPGKEREFVAAIVWPGGETYYRDSVKGRFTLSRDNAKNTVYLQMNSLRPEDTALYSCAVKIFSKTGTYSASWEYDFWGQGTLVTVSS

SEQ ID NO: 1349 - protein, 126 aa, synthetic construct
EVQLVESGGGVVQPGGSLRLSCAAPGDTFSENDGGWFRQTPGKEREFVAAIVWPGGETYYRDSVKGRFTLSRDNAKNTVYLQMNSLRPEDTALYSCAVKIFSKTGTYSASWEYDFWGQGTLVTVSS

SEQ ID NO: 1350 - protein, 126 aa, synthetic construct
EVQLVESGGGVVQPGGSLRLSCAAPGDTFSENDYGWFRQTPGKEREFVAAIVWPGGETYYRDSVKGRFTLSRDNAKNTVYLQMNSLRPEDTALYSCAVKIFSKTGTYSASWEYDFWGQGTLVTVSS

SEQ ID NO: 1351 - protein, 126 aa, synthetic construct
EVQLVESGGGVVQPGGSLRLSCAAPGDTFSENDQGWFRQTPGKEREFVAAIVWPGGETYYRDSVKGRFTLSRDNAKNTVYLQMNSLRPEDTALYSCAVKIFSKTGTYSASWEYDFWGQGTLVTVSS

SEQ ID NO: 1352 - protein, 126 aa, synthetic construct
EVQLVESGGGVVQPGGSLRLSCAAPGDTFSENDEGWFRQTPGKEREFVAAIVWPGGETYYRDSVKGRFTLSRDNAKNTVYLQMNSLRPEDTALYSCAVKIFSKTGTYSASWEYDFWGQGTLVTVSS

SEQ ID NO: 1353 - protein, 126 aa, synthetic construct
EVQLVESGGGVVQPGGSLRLSCAAPGDTFSENDKGWFRQTPGKEREFVAAIVWPGGETYYRDSVKGRFTLSRDNAKNTVYLQMNSLRPEDTALYSCAVKIFSKTGTYSASWEYDFWGQGTLVTVSS

SEQ ID NO: 1354 - protein, 126 aa, synthetic construct
EVQLVESGGGAVQPGGSLRLSCAAPGDTFSENDRGWFRQTPGKEREFVAAIVWPGGETYYRDSVKGRFTLSRDNAKNTVYLQMNSLRPEDTALYSCAVKIFSKTGTYSASWEYDFWGQGTLVTVSS

SEQ ID NO: 1355 - protein, 126 aa, synthetic construct
EVQLVESGGGVVQPGGSLRLSCAAPGDTFSENDFGWFRQTPGKEREFVAAIVWPGGETYYRDSVKGRFTLSRDNAKNTVYLQMNSLRPEDTALYPCAVKIFSKTGTYSASWEYDFWGQGTLVTVSS

SEQ ID NO: 1356 - protein, 126 aa, synthetic construct
EVQLVESGGGVVQPGGSLRLSCAAPGDTFSENDTGWFRQTPGKEREFVAAIVWPGGETYYRDSVKGRFTLSRDNAKNTVYLQMNSLRPEDTALYSCAVKIFSKTGTYSASWEYDFWGQGTLVTVSS

SEQ ID NO: 1357 - protein, 126 aa, synthetic construct
EVQLVESGGGVVQPGGSLRLSCAAPGDTFSENDSGWFRQTPGKEREFVAAIVWPGGETYYRDSVKGRFTLSRDNAKNTVYLQMNSLRPEDTALYSCAVKIFSKTGTYSASWEYDFWGQGTLVTVSS

SEQ ID NO: 1358 - protein, 126 aa, synthetic construct
EVQLVESGGGVVQPGGSLRLSCAAPGDTFSENDAGWFRQTPGKEREFVAAIVWPGGETYYRDSVKGRFTLSRDNAKNTVYLQMNSLRPEDTALYSCAVKIFSKTGTYSASWEYDFWGQGTLVTVSS

SEQ ID NO: 1359 - protein, 126 aa, synthetic construct
EVQLVESGGGVVQPGGSLRLSCAAPGDTFSENDDGWFRQTPGKEREFVAAIVWPGGETYYRDSVKGRFTLSRDNAKNTVYLQMNSLRPEDTALYSCAVKIFSKTGTYSASWEYDFWGQGTLVTVSS

SEQ ID NO: 1360 - protein, 126 aa, synthetic construct
EVQLVESGGGVVQPGGSLRLSCAAPGDTFSENDPGWFRQTPGKEREFVAAIVWPGGETYYRDSVKGRFTLSRDNAKNTVYLQMNSLRPEDTALYSCAVKIFSKTGTYSASWEYDFWGQGTLVTVSS

SEQ ID NO: 1361 - protein, 126 aa, synthetic construct
EVQLVESGGGVVQPGGSLRLSCAAPGDTFSENSIGWFRQTPGKEREFVAAIVWPGGETYYRDSVKGRFTLSRDNAKNTVYLQMNSLRPEDTALYSCAVKIFSKTGTYSASWEYDFWGQGTLVTVSS

SEQ ID NO: 1362 - protein, 126 aa, synthetic construct
EVQLVESGGGVVQPGGSLRLSCAAPGDTFIENIIGWFRQTPGKEREFVAAIVWPGGETYYRDSVKGRFTLSRDNAKNTVYLQMNSLRPEDTALYSCAVKIFSKTGTYSASWEYDFWGQGTLVTVSS

SEQ ID NO: 1363 - protein, 126 aa, synthetic construct
EVQLVESGGGVVQPGGSLRLSCAAPGDTFSENDIGWFRQTPGKEREFVAAIKWPGGETYYRDSVKGRFTLSRDNAKNTVYLQMNSLRPEDTALYSCAVKIFSKTGTYSASWEYDFWGQGTLVTVSS

SEQ ID NO: 1364 - protein, 126 aa, synthetic construct
EVQLVESGGGVVQPGGSLRLSCAAPGDTFSENDIGWFRQTPGKEREFVAAIVWYGGETYYRDSVKGRFTLSRDNAKNTVYLQMNSLRPEDTALYSCAVKIFSKTGTYSASWEYDFWGQGTLVTVSS

SEQ ID NO: 1365 - protein, 126 aa, synthetic construct
EVQLVESGGGVVQPGGSLRLSCAAPGDTFSENDIGWFRQTPGKEREFVAAIGWPGGETYYRDSVKGRFTLSRDNAKNTVYLQMNSLRPEDTALYSCAVKIFSKTGTYSASWEYDFWGQGTLVTVSS

SEQ ID NO: 1366 - protein, 126 aa, synthetic construct
EVQLVESGGGVVQPGGSLRLSCAAPGDTFSENDIGWFRQTPGKEREFVAAIVWPGHETYYRDSVKGRFTLSRDNAKNTVYLQMNSLRPEDTALYSCAVKIFSKTGTYSASWEYDFWGQGTLVTVSS

SEQ ID NO: 1367 - protein, 126 aa, synthetic construct
EVQLVESGGGVVQPGGSLRLSCAAPGDTFSENDIGWFRQTPGKEREFVAAIVWFGGETYYRDSVKGRFTLSRDNAKNTVYLQMNSLRPEDTALYSCAVKIFSKTGTYSASWEYDFWGQGTLVTVSS

SEQ ID NO: 1368 - protein, 126 aa, synthetic construct
EVQLVESGGGVVQPGGSLRLSCAAPGDTFSENDIGWFRQTPGKEREFVAAIVWGGGETYYRDSVKGRFTLSRDNAKNTVYLQMNSLRPEDTALYSCAVKIFSKTGTYSASWEYDFWGQGTLVTVSS

SEQ ID NO: 1369 - protein, 126 aa, synthetic construct
EVQLVESGGGVVQPGGSLRISCAAPGDTFSENDIGWFRQTPGKEREFVAAIVWIGGETYYRDSVKGRFTLSRDNAKNTVYLQMNSLRPEDTALYSCAVKIFSKTGTYSASWEYDFWGQGTLVTVSS

SEQ ID NO: 1370 - protein, 126 aa, synthetic construct
EVQLVESGGGVVQPGGSLRLSCAAPGDTFSENDIGWFRQTPGKEREFVAAIVWLGGETYYRDSVKGRFTLSRDNAKNTVYLQMNSLRPEDTALYSCAVKIFSKTGTYSASWEYDFWGQGTLVTVSS

SEQ ID NO: 1371 - protein, 126 aa, synthetic construct
EVQLVESGGGVVQPGGSLRLSCAAPGDTFSENDIGWFRQTPGKEREFVAAIVWTGGETYYRDSVKGRFTLSRDNAKNTVYLQMNSLRPEDTALYSCAVKIFSKTGTYSASWEYDFWGQGTLVTVSS

SEQ ID NO: 1372 - protein, 126 aa, synthetic construct
EVQLVESGGGVVQPGGSLRLSCAAPGDTFSENDIGWFRQTPGKEREFVAAIVWPGGETYYRDSVKGRFTLSRDNAKNTVYLQMNSLRPEDTALYSCSVKIFSKTGTYSASWEYDFWGQGTLVTVSS

SEQ ID NO: 1373 - protein, 126 aa, synthetic construct
EVQLVESGGGVVQPGGSLRLSCAAPGDTFSENDIGWFRQTPGKEREFVAAIVWQGGETYYRDSVKGRFTLSRDNAKNTVYLQMNSLRPEDTALYSCAVKIFSKTGTYSASWEYDFWGQGTLVTVSS

SEQ ID NO: 1374 - protein, 126 aa, synthetic construct
EVQLVESGGGVVQPGGSLRLSCAAPGDTFSENDIGWFRQTPGKEREFVAAIVWHGGETYYRDSVKGRFTLSRDNAKNTVYLQMNSLRPEDTALYSCAVKIFSKTGTYSASWEYDFWGQGTLVTVSS

SEQ ID NO: 1375 - protein, 126 aa, synthetic construct
EVQLVESGGGVVQPGGSLRLSCAAPGDTFSENDIGWFRQTPGKEREFVAAIVPPGGETYYRDSVKGRFTLSRDNAKNTVYLQMNSLRPEDTALYSCAVKIFSKTGTYSASWEYDFWGQGTLVTVSS

SEQ ID NO: 1376 - protein, 126 aa, synthetic construct
EVQLVESGGGVVQPGGSLRLSCAAPGDTFSENDIGWFRQTPGKEREFVAAIVYPGGETYYRDSVKGRFTLSRDNAKNTVYLQMNSLRPEDTALYSCAVKIFSKTGTYSASWEYDFWGQGTLVTVSS

SEQ ID NO: 1377 - protein, 126 aa, synthetic construct
EVQLVESGGGVVQPGGSLRLSCAAPGDTFSENDIGWFRQTPGKEREFVAAIVWEGGETYYRDSVKGRFTLSRDNAKNTVYLQMNSLRPEDTALYSCAVKIFSKTGTYSASWEYDFWGQGTLVTVSS

SEQ ID NO: 1378 - protein, 126 aa, synthetic construct
EVQLVESGGGVVQPGGSLRLSCAAPGDTFSENDIGWFRQTPGKEREFVAAIVWIGGETYYRDSVKGRFTLSRDNAKNTVYLQMNSLRPEDTALYSCAVKIFSKTGTYSASWEYDFWGQGTLVTVSS

SEQ ID NO: 1379 - protein, 126 aa, synthetic construct
EVQLVESGGGVVQPGGSLRLSCAAPGDTFSENDIGWFRQTPGKEREFVAAIVWDGGETYYRDSVKGRFTLSRDNAKNTVYLQMNSLRPEDTALYSCAVKIFSKTGTYSASWEYDFWGQGTLVTVSS

SEQ ID NO: 1380 - protein, 126 aa, synthetic construct
EVQLVESGGGVVQPGGSLRLSCAAPGDTFSENDIGWFRQTPGKEREFVAAIVWPQGETYYRDSVKGRFTLSRDNAKNTVYLQMNSLRPEDTALYSCAVKIFSKTGTYSASWEYDFWGQGTLVTVSS

SEQ ID NO: 1381 - protein, 126 aa, synthetic construct
EVQLVESGGGVVQPGGSLRLSCAAPGDTFSENDIGWFRQTPGKEREFVAAIVWAGGETYYRDSVKGRFTLSRDNAKNTVYLQMNSLRPEDTALYSCAVKIFSKTGTYSASWEYDFWGQGTLVTVSS

SEQ ID NO: 1382 - protein, 126 aa, synthetic construct
EVQLVESGGGVVQPGGSLRLSCAAPGDTFSEYDIGWFRQTPGKEREFVAAIVWPGGETYYRDSVKGRFTLSRDNAKNTVYLQMNSLRPEDTALYSCAVKIFSKTGTYSASWEYDFWGQGTLVTVSS

SEQ ID NO: 1383 - protein, 126 aa, synthetic construct
EVQLVESGGGVVQPGGSLRLSCAAPGDTFSENDIGWFRQTPGKEREFVAAIVWPEGETYYRDSVKGRFTLSRDNAKNTVYLQMNSLRPEDTALYSCAVKIFSKTGTYSASWEYDFWGQGTLVTVSS

SEQ ID NO: 1384 - protein, 126 aa, synthetic construct
EVQLVESGGGVVQPGGSLRLSCAAPGDTFSEHDIGWFRQTPGKEREFVAAIVWPGGETYYRDSVKGRFTLSRDNAKNTVYLQMNSLRPEDTALYSCAVKIFSKTGTYSASWEYDFWGQGTLVTVSS

SEQ ID NO: 1385 - protein, 126 aa, synthetic construct
EVQLVESGGGVVQPGGSLRLSCAAPGDTFSENDIGWFRQTPGKEREFVAAIVWPPGETYYRDSVKGRFTLSRDNAKNTVYLQMNSLRPEDTALYSCAVKIFSKTGTYSASWEYDFWGQGTLVTVSS

SEQ ID NO: 1386 - protein, 126 aa, synthetic construct
EVQLVESGGGVVQPGGSLRLSCAAPGDTFSENDIGWFRQTPGKEREFVAAIVWPLGETYYRDSVKGRFTLSRDNAKNTVYLQMNSLRPEDTALYSCAVKIFSKTGTYSASWEYDFWGQGTLVTVSS

SEQ ID NO: 1387 - protein, 126 aa, synthetic construct
EVQLVESGGGVVQPGGSLRLSCAAPGDTFSENDIGWFRQTPGKEREFVAAIVWPFGETYYRDSVKGRFTLSRDNAKNTVYLQMNSLRPEDTALYSCAVKIFSKTGTYSASWEYDFWGQGTLVTVSS

SEQ ID NO: 1388 - protein, 126 aa, synthetic construct
EVQLVESGGGVVQPGGSLRLSCAAPGDTFSENDIGWFRQTPGKEREFVAAIVWPKGETYYRDSVKGRFTLSRDNAKNTVYLQMNSLRPEDTALYSCAVKIFSKTGTYSASWEYDFWGQGTLVTVSS

SEQ ID NO: 1389 - protein, 126 aa, synthetic construct
EVQLVESGGGVVQPGGSLRLSCAAPGDTFSENDIGWFRQTPGKEREFVAAIVWPIGETYYRDSVKGRFTLSRDNAKNTVYLQMNSLRPEDTALYSCAVKIFSKTGTYSASWEYDFWGQGTLVTVSS

SEQ ID NO: 1390 - protein, 126 aa, synthetic construct
EVQLVESGGGVVQPGGSLRLSCAAPGDTFSENDIGWFRQTPGKEREFVAAIVWSGGETYYRDSVKGRFTLSRDNAKNTVYLQMNSLRPEDTALYSCAVKIFSKTGTYSASWEYDFWGQGTLVTVSS

SEQ ID NO: 1391 - protein, 126 aa, synthetic construct
EVQLVESGGGVVQPGGSLRLSCAAPGDTFSENDIGWFRQTPGKEREFVAAIVQPGGETYYRDSVKGRFTLSRDNAKNTVYLQMNSLRPEDTALYSCAVKIFSKTGTYSASWEYDFWGQGTLVTVSS

SEQ ID NO: 1392 - protein, 126 aa, synthetic construct
EVQLVESGGGVVQPGGSLRLSCAAPGDTFSENDIGWFRQTPGKEREFVAAIVWPSGETYYRDSVKGRFTLSRDNAKNTVYLQMNSLRPEDTALYSCAVKIFSKTGTYSASWEYDFWGQGTLVTVSS

SEQ ID NO: 1393 - protein, 126 aa, synthetic construct
EVQLVESGGGVVQPGGSLRLSCAAPGDTFSENDIGWFRQTPGKEREFVAAIVWPGGETYYRDSVKGRFTLPRDNAKNTVYLQMNSLRPEDTALYSCAVKIFSKTGTYSASWEYDFWGQGTLVTVSS

SEQ ID NO: 1394 - protein, 126 aa, synthetic construct
EVQLVESGGGVVQPGGSLRLSCAAPGDTFSENDIGWFRQTPGKEREFVAAIVWPAGETYYRDSVKGRFTLSRDNAKNTVYLQMNSLRPEDTALYSCAVKIFSKTGTYSASWEYDFWGQGTLVTVSS

SEQ ID NO: 1395 - protein, 126 aa, synthetic construct
EVQLVESGGGVVQPGGSLRLSCAAPGDTFSENDIGWFRQTPGKEREFVAAIVWPDGETYYRDSVKGRFTLSRDNAKNTVYLQMNSLRPEDTALYSCAVKIFSKTGTYSASWEYDFWGQGTLVTVSS

SEQ ID NO: 1396 - protein, 126 aa, synthetic construct
EVQLVESGGGVVQPGGSLRLSCAAPGDTFSENDIGWFRQTPGKEREFVAAIVWPRGETYYRDSVKGRFTLSRDNAKNTVYLQMNSLRPEDTALYSCAVKIFSKTGTYSASWEYDFWGQGTLVTVSS

SEQ ID NO: 1397 - protein, 126 aa, synthetic construct
EVQLVESGGGVVQPGGSLRLSCAAPGDTFSENDIGWFRQTPGKEREFVAAIVWPHGETYYRDSVKGRFTLSRDNAKNTVYLQMNSLRPEDTALYSCAVKIFSKTGTYSASWEYDFWGQGTLVTVSS

SEQ ID NO: 1398 - protein, 126 aa, synthetic construct
EVQLVESGGGVVQPGGSLRLSCAAPGDTFSENDIGWFRQTPGKEREFVAAIVWPVGETYYRDSVKGRFTLSRDNAKNTVYLQMNSLRPEDTALYSCAVKIFSKTGTYSASWEYDFWGQGTLVTVSS

SEQ ID NO: 1399 - protein, 126 aa, synthetic construct
EVQLVESGGGVVQPGGSLRLSCAAPGDTFSENDIGWFRQTPGKEREFVAAIVWVGGETYYRDSVKGRFTLSRDNAKNTVYLQMNSLRPEDTALYSCAVKIFSKTGTYSASWEYDFWGQGTLVTVSS

SEQ ID NO: 1400 - protein, 126 aa, synthetic construct
EVQLVESGGGVVQPGGSLRLSCAAPGDTFSENDIGWFRQTPGKEREFVAAIVGPGGETYYRDSVKGRFTLSRDNAKNTVYLQMNSLRPEDTALYSCAVKIFSKTGTYSASWEYDFWGQGTLVTVSS

SEQ ID NO: 1401 - protein, 126 aa, synthetic construct
EVQLVESGGGVVQPGGSLRLSCAAPGDTFSENDIGWFRQTPGKEREFVAAIVTPGGETYYRDSVKGRFTLSRDNAKNTVYLQMNSLRPEDTALYSCAVKIFSKTGTYSASWEYDFWGQGTLVTVSS

SEQ ID NO: 1402 - protein, 126 aa, synthetic construct
EVQLVESGGGVVQPGGSLRLSCAAPGDTFSENDIGWFRQTPGKEREFVAAIQWPGGETYYRDSVKGRFTLSRDNAKNTVYLQMNSLRPEDTALYSCAVKIFSKTGTYSASWEYDFWGQGTLVTVSS

SEQ ID NO: 1403 - protein, 126 aa, synthetic construct
EVQLVESGGGVVQPGGSLRLSCAAPGDTFSENDIGWFRQTPGKEREFVAAIYWPGGETYYRDSVKGRFTLSRDNAKNTVYLQMNSLRPEDTALYSCAVKIFSKTGTYSASWEYDFWGQGTLVTVSS

SEQ ID NO: 1404 - protein, 126 aa, synthetic construct
EVQLVESGGGVVQPGGSLRLSCAAPGDTFSENDIGWFRQTPGKEREFVAAIAWPGGETYYRDSVKGRFTLSRDNAKNTVYLQMNSLRPEDTALYSCAVKIFSKTGTYSASWEYDFWGQGTLVTVSS

SEQ ID NO: 1405 - protein, 126 aa, synthetic construct
EVQLVESGGGVVQPGGSLRLSCAAPGDTFSENDIGWFRQTPGKEREFVAAVVWPGGETYYHDSVKGRFTLSRDNAKNTVYLQMNSLRPEDTALYSCAVKIFSKTGTYSASWEYDFWGQGTLVTVSS

SEQ ID NO: 1406 - protein, 126 aa, synthetic construct
EVQLVESGGGVVQPGGSLRLSCAAPGDTFSENDIGWFRQTPGKEREFVAAITWPGGETYYRDSVKGRFTLSRDNAKNTVYLQMNSLRPEDTALYSCAVKIFSKTGTYSASWEYDFWGQGTLVTVSS

SEQ ID NO: 1407 - protein, 126 aa, synthetic construct
EVQLVESGGGVVQPGGSLRLSCAAPGDTFSENDIGWFRQTPGKEREFVAAISWPGGETYYRDSVKGRFTLSRDNAKNTVYLQMNSLRPEDTALYSCAVKIFSKTGTYSASWEYDFWGQGTLVTVSS

SEQ ID NO: 1408 - protein, 126 aa, synthetic construct
EVQLVESGGGVVQPGGSLRLSCAAPGDTFSENDIGWFRQTPGKEREFVAAIPWPGGETYYRDSVKGRFTLSRDNAKNTVYLQMNSLRPEDTALYSCAVKIFSKTGTYSASWEYDFWGQGTLVTVSS

SEQ ID NO: 1409 - protein, 126 aa, synthetic construct
EVQLVESGGGVVQPGGSLRLSCAAPGDTFSENDIGWFRQTPGKEREFVAATVWPGGETYYRDSVKGRFTLSRDNAKNTVYLQMNSLRPEDTALYSCAVKIFSKTGTYSASWEYDFWGQGTLVTVSS

SEQ ID NO: 1410 - protein, 126 aa, synthetic construct
EVQLVESGGGVVQPGGSLRLSCAAPGDTFSENDIGWFRQTPGKEREFVAAIVDPGGETYYRDSVKGRFTLSRDNAKNTVYLQMNSLRPEDTALYSCAVKIFSKTGTYSASWEYDFWGQGTLVTVSS

SEQ ID NO: 1411 - protein, 126 aa, synthetic construct
EVQLVESGGGVVQPGGSLRLSCAAPGDTFSENDIGWFRQTPGKEREFVAAEVWPGGETYYRDSVKGRFTLSRDNAKNTVYLQMNSLRPEDTALYSCAVKIFSKTGTYSASWEYDFWGQGTLVTVSS

SEQ ID NO: 1412 - protein, 126 aa, synthetic construct
EVQLVESGGGVVQPGGSLRLSCAAPGDTFSENDIGWFRQTPGKEREFVAAYVWPGGETYYRDSVKGRFTLSRDNAKNTVYLQMNSLRPEDTALYSCAVKIFSKTGTYSASWEYDFWGQGTLVTVSS

SEQ ID NO: 1413 - protein, 126 aa, synthetic construct
EVQLVESGGGVVQPGGSLRLSCAAPGDTFSENDIGWFRQTPGKEREFVAASVWPGGETYYRDSVKGRFTLSRDNTKNTVYLQMNSLRPEDTALYSCAVKIFSKTGTYSASWEYDFWGQGTLVTVSS

SEQ ID NO: 1414 - protein, 126 aa, synthetic construct
EVQLVESGGGVVQPGGSLRLSCAAPGDTFSENDIGWFRQTPGKEREFVAASVWPGGETYYRDSVKGRFTLSRDNAKNTVYLQMNSLRPEDTALYSCAVKIFSKTGTYSASWEYDFWGQGTLVTVSS

SEQ ID NO: 1415 - protein, 126 aa, synthetic construct
EVQLVESGGGVVQPGGSLRLSCAAPGYTFSENDIGWFRQTPGKEREFVAAQVWPGGETYYRDSVKGRFTLSRDNAKNTVYLQMNSLRPEDTALYSCAVKIFSKTGTYSASWEYDFWGQGTLVTVSS

SEQ ID NO: 1416 - protein, 126 aa, synthetic construct
EVQLVESGGGVVQPGGSLRLSCAAPGDTFSENDIGWFRQTPGKEREFVAADVWPGGETYYRDSVKGRFTLSRDNAKNTVYLQMNSLRPEDTALYSCAVKIFSKTGTYSASWEYDFWGQGTLVTVSS

SEQ ID NO: 1417 - protein, 126 aa, synthetic construct
EVQLVESGGGVVQPGGSLRLSCAAPGDTFSEADIGWFRQTPGKEREFVAAIVWPGGETYYRDSVKGRFTLSRDNAKNTVYLQMNSLRPEDTALYSCAVKIFSKTGTYSASWEYDFWGQGTLVTVSS

SEQ ID NO: 1418 - protein, 126 aa, synthetic construct
EVQLVESGGGVVQPGGSLRLSCAAPGDTFSENDIGWFRQTPGKEREFVAAIVHPGGETYYRDSVKGRFTLSRDNAKNTVYLQMNSLRPEDTALYSCAVKIFSKTGTYSASWEYDFWGQGTLVTVSS

SEQ ID NO: 1419 - protein, 126 aa, synthetic construct
EVQLVESGGGVVQPGGSLRLSCAAPGDTFSENHIGWFRQTPGKEREFVAAIVWPGGETYYRDSVKGRFTLSRDNAKNTVYLQMNSLRPEDTALYSCAVKIFSKTGTYSASWEYDFWGQGTLVTVSS

SEQ ID NO: 1420 - protein, 126 aa, synthetic construct
EVQLVESGGGVVQPGGSLRLSCAAPGDTFSENDIGWFRQTPGKEREFVAARVWPGGETYYRDSVKGRFTLSRDNAKNTVYLQMNSLRPEDTALYSCAVKIFSKTGTYSASWEYDFWGQGTLVTVSS

SEQ ID NO: 1421 - protein, 126 aa, synthetic construct
EVQLVESGGGVVQPGGSLRLSCAAPGDTFSENDIGWFRQTPGKEREFVAAIVRPGGETYYRDSVKGRFTLSRDNAKNTVYLQMNSLRPEDTALYSCAVKIFSKTGTYSASWEYDFWGQGTLVTVSS

SEQ ID NO: 1422 - protein, 126 aa, synthetic construct
EVQLVESGGGVVQPGGSLRLSCAAPGDTFSENDIGWFRQTPGKEREFVAAIVKPGGETYYRDSVKGRFTLSRDNAKNTVYLQMNSLRPEDTALYSCAVKIFSKTGTYSASWEYDFWGQGTLVTVSS

SEQ ID NO: 1423 - protein, 126 aa, synthetic construct
EVQLVESGGGVVQPGGSLRLSCAAPGDTFSENDIGWFRQTPGKEREFVAAIVSPGGETYYRDSVKGRFTLSRDNAKNTVYLQMNSLRPEDTALYSCAVKIFSKTGTYSASWEYDFWGQGTLVTVSS

SEQ ID NO: 1424 - protein, 126 aa, synthetic construct
EVQLVESGGGVVQPGGSLRLSCAAPGDTFSENDIGWFRQTPGKEREFVAAIVLPGGETYYRDSVKGRFTLSRDNAKNTVYLQMNSLRPEDTALYSCAVKIFSKTGTYSASWEYDFWGQGTLVTVSS

SEQ ID NO: 1425 - protein, 126 aa, synthetic construct
EVQLVESGGGVVQPGGSLRLSCAAPGDTFSENDIGWFRQTPGKEREFVAAIVIPGGETYYRDSVKGRFTLSRDNAKNTVYLQMNSLRPEDTALYSCAVKIFSKTGTYSASWEYDFWGQGTLVTVSS

SEQ ID NO: 1426 - protein, 126 aa, synthetic construct
EVQLVESGGGVVQPGGSLRLSCAAPGDTFSENDIGWFRQTPGKEREFVAAIVVPGGETYYRDSVKGRFTLSRDNAKNTVYLQMNSLRPEDTALYSCAVKIFSKTGTYSASWEYDFWGQGTLVTVSS

SEQ ID NO: 1427 - protein, 126 aa, synthetic construct
EVQLVESGGGVVQPGGSLRLSCAAPGDTFSENDIGWFRQTPGKEREFVAAIVFPGGETYYRDSVKGRFTLSRDNAKNTVYLQMNSLRPEDTALYSCAVKIFSKTGTYSASWEYDFWGQGTLVTVSS

SEQ ID NO: 1428 - protein, 126 aa, synthetic construct
EVQLVESGGGVVQPGGSLRLSCAAPGDTFSENDIGWFRQTPGKEREFVAAIVAPGGETYYRDSVKGRFTLSRDNAKNTVYLQMNSLRPEDTALYSCAVKIFSKTGTYSASWEYDFWGQGTLVTVSS

SEQ ID NO: 1429 - protein, 126 aa, synthetic construct
EVQLVESGGGVVQPGGSLRLSCAAPGDTFSENDIGWFRQTPGKEREFVAAIIWPGGETYYRDSVKGRFTLSRDNAKNTVYLQMNSLRPEDTALYSCAVKIFSKTGTYSASWEYDFWGQGTLVTVSS

SEQ ID NO: 1430 - protein, 126 aa, synthetic construct
EVQLVESGGGVVQPGGSLRLSCAAPGDTFSENDIGWFRQTPGKEREFVAAIFWPGGETYYRDSVKGRFTLSRDNAKNTVYLQMNSLRPEDTALYSCAVKIFSKTGTYSASWEYDFWGQGTLVTVSS

SEQ ID NO: 1431 - protein, 126 aa, synthetic construct
EVQLVESGGGVVQPGGSLRLSCAAPGDTFSENDIGWFRQTPGKEREFVAAIRWPGGETYYRDSVKGRFTLSRDNAKNTVYLQMNSLRPEDTALYSCAVKIFSKTGTYSASWEYDFWGQGTLVTVSS

SEQ ID NO: 1432 - protein, 126 aa, synthetic construct
EVQLVESGGGVVQPGGSLRLSCAAPGDTFSENDIGWFRQTPGKEREFVAAIDWPGGETYYRDSVKGRFTLSRDNAKNTVYLQMNSLRPEDTALYSCAVKIFSKTGTYSASWEYDFWGQGTLVTVSS

SEQ ID NO: 1433 - protein, 126 aa, synthetic construct
EVQLVESGGGVVQPGGSLRLSCAAPGDTFSENDIGWFRQTPGKEREFVAAIRWPGGETYYRDSVKGRFTLSRDNAKNTVYLQMNSLRPEDTASYSCAVKIFSKTGTYSASWEYDFWGQGTLVTVSS

SEQ ID NO: 1434 - protein, 126 aa, synthetic construct
EVQLVESGGGVVQPGGSLRLSCAAPGDTFSENDIGWFRQTPGKEREFVAAILWPGGETYYRDSVKGRFTLSRDNAKNTVYLQMNSLRPEDTALYSCAVKIFSKTGTYSASWEYDFWGQGTLVTVSS

SEQ ID NO: 1435 - protein, 126 aa, synthetic construct
EVQLVESGGGVVQPGGSLRLSCAAPGDTFSENEIGWFRQTPGKEREFVAAIVWPGGETYYRDSVKGRFTLSRDNAKNTVYLQMNSLRPEDTALYSCAVKIFSKTGTYSASWEYDFWGQGTLVTVSS

SEQ ID NO: 1436 - protein, 126 aa, synthetic construct
EVQLVESGGGVVQPGGSLRLSCAAPGDTFSQNDIGWFRQAPGKEREFVAAIVWPGAETYYKDKVKGRFTLSRDNAKNTVYLQMNSLRPEDTALYYCAQKIFSRTGTYSASWEYDFWGQGTLVTVSS

SEQ ID NO: 1437 - protein, 126 aa, synthetic construct
EVQLVESGGGVVQPGGSLRLSCAAPGDTFSENDIGWFRQAPGKEREFVAAIFWPGGETYYRDKVKGRFTLSRDNVKNTVSLQMNSLRPEDTALYYCAVKIFSKTGTYSASWEYDFWGQGTLVTVSS

SEQ ID NO: 1438 - protein, 126 aa, synthetic construct
EVQLVESGGGVVQPGGSLRLSCAAPGDTFSEKDIGWFRQTPGKEREFVAAIVWPGGETYYRDSVKGRFTLSRDNAKNTVYLQMNSLRPEDTALYSCAVKIFSKTGTYSASWEYDFWGQGTLVTVSS

SEQ ID NO: 1439 - protein, 126 aa, synthetic construct
EVQLVESGGGVVQPGGSLRLSCAATGDTFSENDIGWFRQTPGKEREFVAAIVWPGGETYYRDSVKGRFTLSRDNAKNTVYLQMNSLRPEDTALYSCAVKIFSKTGTYSASWEYDFWGQGTLVTVSS

SEQ ID NO: 1440 - protein, 126 aa, synthetic construct
EVQLVESGGGVVQPGGSLRLSCAAIGDTFSENDIGWFRQTPGKEREFVAAIVWPGGETYYRDSVKGRFTLSRDNAKNTVYLQMNSLRPEDTALYSCAVKIFSKTGTYSASWEYDFWGQGTLVTVSS

SEQ ID NO: 1441 - protein, 126 aa, synthetic construct
EVQLVESGGGVVQPGGSLRLSCAALGDTFSENDIGWFRQTPGKEREFVAAIVWPGGETYYRDSVKGRFTLSRDNAKNTVYLQMNSLRPEDTALYSCAVKIFSKTGTYSASWEYDFWGQGTLVTVSS

SEQ ID NO: 1442 - protein, 126 aa, synthetic construct
EVQLVESGGGVVQPGGSLRLSCAAKGDTFSENDIGWFRQTPGKEREFVAAIVWPGGETYYRDSVKGRFTLSRDNAKNTVYLQMNSLRPEDTALYSCAVKIFSKTGTYSASWEYDFWGQGTLVTVSS

SEQ ID NO: 1443 - protein, 126 aa, synthetic construct
EVQLVESGGGVVQPGGSLRLSCAAPKDTFSENDIGWFRQTPGKEREFVAAIVWPGGETYYRDSVKGRFTLSRDNAKNTVYLQMNSLRPEDTALYSCAVKIFSKTGTYSASWEYDFWGQGTLVTVSS

SEQ ID NO: 1444 - protein, 126 aa, synthetic construct
EVQLVESGGGVVQPGGSLRLSCAAHGDTFSENDIGWFRQTPGKEREFVAAIVWPGGETYYRDSVKGRFTLSRDNAKNTVYLQMNSLRPEDTALYSCAVKIFSKTGTYSASWEYDFWGQGTLVTVSS

SEQ ID NO: 1445 - protein, 126 aa, synthetic construct
EVQLVESGGGVVQPGGSLRLSCAARGDTFSENDIGWFRQTPGKEREFVAAIVWPGGETYYRDSVKGRFTLSRDNAKNTVYLQMNSLRPEDTALYSCAVKIFSKTGTYSASWEYDFWGQGTLVTVSS

SEQ ID NO: 1446 - protein, 126 aa, synthetic construct
EVQLVESGGGVVQPGGSLRLSCAAVGDTFSENDIGWFRQTPGKEREFVAAIVWPGGETYYRDSVKGRFTLSRDNAKNTVYLQMNSLRPEDTALYSCAVKIFSKTGTYSASWEYDFWGQGTLVTVSS

SEQ ID NO: 1447 - protein, 126 aa, synthetic construct
EVQLVESGGGVVQPGGSLRLSCAAEGDTFSENDIGWFRQTPGKEREFVAAIVWPGGETYYRDSVKGRFTLSRDNAKNTVYLQMNSLRPEDTALYSCAVKIFSKTGTYSASWEYDFWGQGTLVTVSS

SEQ ID NO: 1448 - protein, 126 aa, synthetic construct
EVQLVESGGGVVQPGGSLRLSCAAQGDTFSENDIGWFRQTPGKEREFVAAIVWPGGETYYRDSVKGRFTLSRDNAKNTVYLQMNSLRPEDTALYSCAVKIFSKTGTYSASWEYDFWGQGTLVTVSS

SEQ ID NO: 1449 - protein, 126 aa, synthetic construct
EVQLVESGGGVVQPGGSLRLSCAAAGDTFSENDIGWFRQTPGKEREFVAAIVWPGGETYYRDSVKGRFTLSRDNAKNTVYLQMNSLRPEDTALYSCAVKIFSKTGTYSASWEYDFWGQGTLVTVSS

SEQ ID NO: 1450 - protein, 126 aa, synthetic construct
EVQLVESGGGVVQPGGSLRLSCAADGDTFSENDIGWFRQTPGKEREFVAAIVWPGGETYYRDSVKGRFTLSRDNAKNTVYLQMNSLRPEDTALYSCAVKIFSKTGTYSASWEYDFWGQGTLVTVSS

SEQ ID NO: 1451 - protein, 126 aa, synthetic construct
EVQLVESGGGVVQPGGSLRLSCAAFGDTFSENDIGWFRQTPGKEREFVAAIVWPGGETYYRDSVKGRFTLSRDNAKNTVYLQMNSLRPEDTALYSCAVKIFSKTGTYSASWEYDFWGQGTLVTVSS

SEQ ID NO: 1452 - protein, 126 aa, synthetic construct
EVQLVESGGGVVQPGGSLRLSCAAGGDTFSENDIGWFRQTPGKEREFVAAIVWPGGETYYRDSVKGRFTLSRDNAKNTVYLQMNSLRPEDTALYSCAVKIFSKTGTYSASWEYDFWGQGTLVTVSS

SEQ ID NO: 1453 - protein, 126 aa, synthetic construct
EVQLVESGGGVVQPGGSLRLSCAAPGRTFSENDIGWFRQTPGKEREFVAAIVWPGGETYYRDSVKGRFTLSRDNAKNTVYLQMNSLRPEDTALYSCAVKIFSKTGTYSASWEYDFWGQGTLVTVSS

SEQ ID NO: 1454 - protein, 126 aa, synthetic construct
EVQLVESGGGVVQPGGSLRLSCAAPFDTFSENDIGWFRQTPGKEREFVAAIVWPGGETYYRDSVKGRFTLSRDNAKNTVYLQMNSLRPEDTALYSCAVKIFSKTGTYSASWEYDFWGQGTLVTVSS

SEQ ID NO: 1455 - protein, 126 aa, synthetic construct
EVQLVESGGGVVQPGGSLRLSCAASGDTFSENDIGWFRQTPGKEREFVAAIVWPGGETYYRDSVKGRFTISRDNAKNTVYLQMNSLRPEDTALYYCAVKIFSKTGTYSASWEYDFWGQGTLVTVSS

SEQ ID NO: 1456 - protein, 126 aa, synthetic construct
EVQLVESGGGVVQPGGSLRLSCAAPGETFSENDIGWFRQTPGKEREFVAAIVWPGGETYYRDSVKGRFTLSRDNAKNTVYLQMNSLRPEDTALYSCAVKIFSKTGTYSASWEYDFWGQGTLVTVSS

SEQ ID NO: 1457 - protein, 126 aa, synthetic construct
EVQLVESGGGVVQPGGSLRLSCAAPGTTFSENDIGWFRQTPGKEREFVAAIVWPGGETYYRDSVKGRFTLSRDNAKNTVYLQMNSLRPEDTALYSCAVKIFSKTGTYSASWEYDFWGQGTLVTVSS

SEQ ID NO: 1458 - protein, 126 aa, synthetic construct
EVQLVESGGGVVQPGGSLRLSCAAPGLTFSENDIGWFRQTPGKEREFVAAIVWPGGETYYRDSVKGRFTLSRDNAKNTVYLQMNSLRPEDTALYSCAVKIFSKTGTYSASWEYDFWGQGTLVTVSS

SEQ ID NO: 1459 - protein, 126 aa, synthetic construct
EVQLVESGGGVVQPGGSLRLSCAAPGKTFSENDIGWFRQTPGKEREFVAAIVWPGGETYYRDSVKGRFTLSRDNAKNTVYLQMNSLRPEDTALYSCAVKIFSKTGTYSASWEYDFWGQGTLVTVSS

SEQ ID NO: 1460 - protein, 126 aa, synthetic construct
EVQLVESGGGVVQPGGSLRLSCAAPGHTFSENDIGWFRQTPGKEREFVAAIVWPGGETYYRDSVKGRFTLSRDNAKNTVYLQMNSLRPEDTALYSCAVKIFSKTGTYSASWEYDFWGQGTLVTVSS

SEQ ID NO: 1461 - protein, 126 aa, synthetic construct
EVQLVESGGGVVQPGGSLRLSCAAPADTFSENDIGWFRQTPGKEREFVAAIVWPGGETYYRDSVKGRFTLSRDNAKNTVYLQMNSLRPEDTALYSCAVKIFSKTGTYSASWEYDFWGQGTLVTVSS

SEQ ID NO: 1462 - protein, 126 aa, synthetic construct
EVQLVESGGGVVQPGGSLRLSCAAPYDTFSENDIGWFRQTPGKEREFVAAIVWPGGETYYRDSVKGRFTLSRDNAENTVYLQMNSLRPEDTALYSCAVKIFSKTGTYSASWEYDFWGQGTLVTVSS

SEQ ID NO: 1463 - protein, 126 aa, synthetic construct
EVQLVESGGGVVQPGGSLRLSCAAPGDTFSENDIGWFRQTPGKEREFVAAIVWPGGETYYRDSVKGRFTLSRDNAKNTVSLQMNSLRPEDTALYSCAVKIFSKTGTYSASWEYDFWGQGTLVTVSS

SEQ ID NO: 1464 - protein, 126 aa, synthetic construct
EVQLVESGGGVVQPGGSLRLSCAAPTDTFSENDIGWFRQTPGKEREFVAAIVWPGGETYYRDSVKGRFTLSRDNAKNTVYLQMNSLRPEDTALYSCAVKIFSKTGTYSASWEYDFWGQGTLVTVSS

SEQ ID NO: 1465 - protein, 126 aa, synthetic construct
EVQLVESGGGVVQPGGSLRLSCAAPVDTFSENDIGWFRQTPGKEREFVAAIVWPGGETYYRDSVKGRFTLSRDNAKNTVYLQMNSLRPEDTALYSCAVKIFSKTGTYSASWEYDFWGQGTLVTVSS

SEQ ID NO: 1466 - protein, 126 aa, synthetic construct
EVQLVESGGGVVQPGGSLRLSCAAPHDTFSENDIGWFRQTPGKEREFVAAIVWPGGETYYRDSVKGRFTLSRDNAKNTVYLQMNSLRPEDTALYSCAVKIFSKTGTYSASWEYDFWGQGTLVTVSS

SEQ ID NO: 1467 - protein, 126 aa, synthetic construct
EVQLVESGGGVVQPGGSLRLSCAAPRDTFSENDIGWFRQTPGKEREFVAAIVWPGGETYYRDSVKGRFTLSRDNAKNTVYLQMNSLRPEDTALYSCAVKIFSKTGTYSASWEYDFWGQGTLVTVSS

SEQ ID NO: 1468 - protein, 126 aa, synthetic construct
EVQLVESGGGVVQPGGSLRLSCAAPSDTFSENDIGWFRQTPGKEREFVAAIVWPGGETYYRDSVKGRFTLSRDNAKNTVYLQMNSLRPEDTALYSCAVKIFSKTGTYSASWEYDFWGQGTLVTVSS

SEQ ID NO: 1469 - protein, 126 aa, synthetic construct
EVQLVESGGGVVQPGGSLRLSCAAPPDTFSENDIGWFRQTPGKEREFVAAIVWPGGETYYRDSVKGRFTLSRDNAKNTVYLQMNSLRPEDTALYSCAVKIFSKTGTYSASWEYDFWGQGTLVTVSS

SEQ ID NO: 1470 - protein, 126 aa, synthetic construct
EVQLVESGGGVVQPGGSLRLSCAAPIDTFSENDIGWFRQTPGKEREFVAAIVWPGGETYYRDSVKGRFTLSRDNAKNTVYLQMNSLRPEDTALYSCAVKIFSKTGTYSASWEYDFWGQGTLVTVSS

SEQ ID NO: 1471 - protein, 126 aa, synthetic construct
EVQLVESGGGVVQPGGSLRLSCAAPGVTFSENDIGWFRQTPGKEREFVAAIVWPGGETYYRDSVKGRFTLSRDNAKNTVYLQMNSLRPEDTALYSCAVKIFSKTGTYSASWEYDFWGQGTLVTVSS

SEQ ID NO: 1472 - protein, 126 aa, synthetic construct
EVQLVESGGGVVQPGGSLRLSCAAPEDTFSENDIGWFRQTPGKEREFVAAIVWPGGETYYRDSVKGRFTLSRDNAKNTVYLQMNSLRPEDTALYSCAVKIFSKTGTYSASWEYDFWGQGTLVTVSS

SEQ ID NO: 1473 - protein, 126 aa, synthetic construct
EVQLVESGGGVVQPGGSLRLSCAAPGDTFSENDIGWFRQTPGKEREFVAAIVWPGGETYYADSVKGRFTLSRDNAKNTVYLQMNSLRPEDTALYYCAVKIFSKTGTYSASWEYDFWGQGTLVTVSS

SEQ ID NO: 1474 - protein, 126 aa, synthetic construct
EVQLVESGGGVVQPGGSLRLSCAASGDTFSENDIGWFRQAPGKEREFVAAIVWPGGETYYRDSVKGRFTISRDNAKNTVYLQMNSLRPEDTALYYCAVKIFSKTGTYSASWEYDFWGQGTLVTVSS

SEQ ID NO: 1475 - protein, 126 aa, synthetic construct
EVQLVESGGGVVQPGGSLRLSCAASGDTFSENDIGWFRQTPGKEREFVAAIVWPGGETYYADSVKGRFTISRDNAKNTVYLQMNSLRPEDTALYYCAVKIFSKTGTYSASWEYDFWGQGTLVTVSS

SEQ ID NO: 1476 - protein, 126 aa, synthetic construct
EVQLVESGGGVVQPGGSLRLSCAASGDTFSENDIGWFRQAPGKEREFVAAIVWPGGETYYRDSVKGRFTLSRDNAKNTVYLQMNSLRPEDTALYSCAVKIFSKTGTYSASWEYDFWGQGTLVTVSS

SEQ ID NO: 1477 - protein, 126 aa, synthetic construct
EVQLVESGGGVVQPGGSLRLSCAAPGDTFSENDIGWFRQTPGKEREFVAAIVWPGGETYYRDSVKGRFTLSRDNAKNTVDLQMNSLRPEDTALYSCAVKIFSKTGTYSASWEYDFWGQGTLVTVSS

SEQ ID NO: 1478 - protein, 126 aa, synthetic construct
EVQLVESGGGVVQPGGSLRLSCAAPGDTFSENDIGWFRQTPGKEREFVAAIVWPGGETYYADSVKGRFTLSRDNAKNTVYLQMNSLRPEDTALYSCAVKIFSKTGTYSASWEYDFWGQGTLVTVSS

SEQ ID NO: 1479 - protein, 126 aa, synthetic construct
EVQLVESGGGVVQPGGSLRLSCAAPGDTFSENDIGWFRQTPGKEREFVAAIVWPGGETYYRDSVKGRFTISRDNAKNTVYLQMNSLRPEDTALYSCAVKIFSKTGTYSASWEYDFWGQGTLVTVSS

SEQ ID NO: 1480 - protein, 126 aa, synthetic construct
EVQLVESGGGVVQPGGSLRLSCAAPGDTFSENDIGWFRQTPGKEREFVAAIVWPGGETYYRDSVKGRFTLSRDNAKNTVYLQMNSLRPEDTALYSCAVKIFSKTGTYSASWEYDFWGQGTLVTVSS

SEQ ID NO: 1481 - protein, 126 aa, synthetic construct
EVQLVESGGGVVQPGGSLRLSCAAPGDTFSENDIGWFRQAPGKEREFVAAIVWPGGETYYADSVKGRFTLSRDNAKNTVYLQMNSLRPEDTALYYCAVKIFSKTGTYSASWEYDFWGQGTLVTVSS

SEQ ID NO: 1482 - protein, 126 aa, synthetic construct
EVQLVESGGGVVQPGGSLRLSCAASGDTFSENDIGWFRQAPGKEREFVAAIVWPGGETYYADSVKGRFTISRDNAKNTVYLQMNSLRPEDTALYYCAVKIFSKTGTYSASWEYDFWGQGTLVTVSS

SEQ ID NO: 1483 - protein, 126 aa, synthetic construct
EVQLVESGGGVVQPGGSLRLSCAASGDTFSENDIGWFRQAPGKEREFVAAIVWPGGETYYADSVKGRFTISRDNAKNTVYLQMNSLRPEDTALYSCAVKIFSKTGTYSASWEYDFWGQGTLVTVSS

SEQ ID NO: 1484 - protein, 126 aa, synthetic construct
EVQLVESGGGVVQPGGSLRLSCAAPGDTFSENDIGWFRQTPGKEREFVAAIVWPGGETYYADSVKGRFTISRDNAKNTVYLQMNSLRPEDTALYSCAVKIFSKTGTYSASWEYDFWGQGTLVTVSS

SEQ ID NO: 1485 - protein, 126 aa, synthetic construct
EVQLVESGGGVVQPGGSLRLSCAAPGDTFSENDIGWFRQTPGKEREFVAAIVWPGGETYYRDSVKGRFTLSRDNAKNTVYLQMNSLRPEDTALYYCAVKIFSKTGTYSASWEYDFWGQGTLVTVSS

SEQ ID NO: 1486 - protein, 126 aa, synthetic construct
DVQLVESGGGVVQPGGSLRLSCAAPGDTFSENDIGWFRQTPGKEREFVAAIVWPGGETYYRDSVKGRFTLSRDNAKNTVYLQMNSLRPEDTALYYCAVKIFSKTGTYSASWEYDFWGQGTLVTVSS

SEQ ID NO: 1487 - protein, 126 aa, synthetic construct
EVQLVESGGGVVQPGGSLRLSCAAPGDTFSENDIGWFRQTPGKEREFVAAIVWPGGETYYRDSVKGRFTISRDNAKNTVYLQMNSLRPEDTALYYCAVKIFSKTGTYSASWEYDFWGQGTLVTVSS

SEQ ID NO: 1488 - protein, 126 aa, synthetic construct
EVQLVESGGGVVQPGGSLRLSCAAPGDTFSENDIGWFRQAPGKEREFVAAIVWPGGETYYADSVKGRFTISRDNAKNTVYLQMNSLRPEDTALYSCAVKIFSKTGTYSASWEYDFWGQGTLVTVSS

SEQ ID NO: 1489 - protein, 126 aa, synthetic construct
EVQLVESGGGVVQPGGSLRLSCAAPGSTFSENDIGWFRQTPGKEREFVAAIVWPGGETYYRDSVKGRFTLSRDNAKNTVYLQMNSLRPEDTALYSCAVKIFSKTGTYSASWEYDFWGQGTLVTVSS

SEQ ID NO: 1490 - protein, 126 aa, synthetic construct
EVQLVESGGGVVQPGGSLRLSCAAPLDTFSENDIGWFRQTPGKEREFVAAIVWPGGETYYRDSVKGRFTLSRDNAKNTVYLQMNSLRPEDTALYSCAVKIFSKTGTYSASWEYDFWGQGTLVTVSS

SEQ ID NO: 1491 - protein, 126 aa, synthetic construct
EVQLVESGGGVVQPGGSLRLSCAASGDTFSENDIGWFRQAPGKEREFVAAIVWPGGETYYADSVKGRFTLSRDNAKNTVYLQMNSLRPEDTALYSCAVKIFSKTGTYSASWEYDFWGQGTLVTVSS

SEQ ID NO: 1492 - protein, 126 aa, synthetic construct
EVQLVESGGGVVQPGGSLRLSCAAPGDTFSENDIGWFRQAPGKEREFVAAIVWPGGETYYADSVKGRFTISRDNAKNTVYLQMNSLRPEDTALYYCAVKIFSKTGTYSASWEYDFWGQGTLVTVSS

SEQ ID NO: 1493 - protein, 126 aa, synthetic construct
EVQLVESGGGVVQPGGSLRLSCAAPGDTFSENDIGWFRQAPGKEREFVAAIVWPGGETYYADSVKGRFTLSRDNAKNTVYLQMNSLRPEDTALYSCAVKIFSKTGTYSASWEYDFWGQGTLVTVSS

SEQ ID NO: 1494 - protein, 126 aa, synthetic construct
EVQLVESGGGVVQPGGSLRLSCAASGDTFSENDIGWFRQAPGKEREFVAAIVWPGGETYYRDSVKGRFTISRDNAKNTVYLQMNSLRPEDTALYSCAVKIFSKTGTYSASWEYDFWGQGTLVTVSS

SEQ ID NO: 1495 - protein, 126 aa, synthetic construct
EVQLVESGGGVVQPGGSLRLSCAASGDTFSENDIGWFRQAPGKEREFVAAIVWPGGETYYRDSVKGRFTLSRDNAKNTVYLQMNSLRPEDTALYYCAVKIFSKTGTYSASWEYDFWGQGTLVTVSS

SEQ ID NO: 1496 - protein, 126 aa, synthetic construct
EVQLVESGGGVVQPGGSLRLSCAASGDTFSENDIGWFRQTPGKEREFVAAIVWPGGETYYADSVKGRFTLSRDNAKNTVYLQMNSLRPEDTALYSCAVKIFSKTGTYSASWEYDFWGQGTLVTVSS

SEQ ID NO: 1497 - protein, 126 aa, synthetic construct
EVQLVESGGGVVQPGGSLRLSCAASGDTFSENDIGWFRQTPGKEREFVAAIVWPGGETYYRDSVKGRFTISRDNAKNTVYLQMNSLRPEDTALYSCAVKIFSKTGTYSASWEYDFWGQGTLVTVSS

SEQ ID NO: 1498 - protein, 126 aa, synthetic construct
EVQLVESGGGVVQPGGSLRLSCAASGDTFSENDIGWFRQTPGKEREFVAAIVWPGGETYYRDSVKGRFTLSRDNAKNTVYLQMNSLRPEDTALYYCAVKIFSKTGTYSASWEYDFWGQGTLVTVSS

SEQ ID NO: 1499 - protein, 126 aa, synthetic construct
EVQLVESGGGVVQPGGSLRLSCAASGDTFSENDIGWFRQAPGKEREFVAAIVWPGGETYYADSVKGRFTLSRDNAKNTVYLQMNSLRPEDTALYYCAVKIFSKTGTYSASWEYDFWGQGTLVTVSS

SEQ ID NO: 1500 - protein, 126 aa, synthetic construct
EVQLVESGGGVVQPGGSLRLSCAAPGDTFSENDIGWFRQTPGKEREFVAAIVWPGGETYYADSVKGRFTISRDNAKNTVYLQMNSLRPEDTALYYCAVKIFSKTGTYSASWEYDFWGQGTLVTVSS

SEQ ID NO: 1501 - protein, 126 aa, synthetic construct
EVQLVESGGGVVQPGGSLRLSCAAPGDTFSENDIGWFRQAPGKEREFVAAIVWPGGETYYRDSVKGRFTISRDNAKNTVYLQMNSLRPEDTALYSCAVKIFSKTGTYSASWEYDFWGQGTLVTVSS

SEQ ID NO: 1502 - protein, 126 aa, synthetic construct
EVQLVESGGGVVQPGGSLRLSCAAPGDTFSENDIGWFRQAPGKEREFVAAIVWPGGETYYRDSVKGRFTISRDNAKNTVYLQMNSLRPEDTALYYCAVKIFSKTGTYSASWEYDFWGQGTLVTVSS

SEQ ID NO: 1503 - protein, 126 aa, synthetic construct
EVQLVESGGGVVQPGGSLRLSCAASGDTFSENDIGWFRQTPGKEREFVAAIVWPGGETYYADSVKGRFTISRDNAKNTVYLQMNSLRPEDTALYSCAVKIFSKTGTYSASWEYDFWGQGTLVTVSS

SEQ ID NO: 1504 - protein, 126 aa, synthetic construct
EVQLVESGGGVVQPGGSLRLSCAASGDTFSENDIGWFRQTPGKEREFVAAIVWPGGETYYADSVKGRFTLSRDNAKNTVYLQMNSLRPEDTALYYCAVKIFSKTGTYSASWEYDFWGQGTLVTVSS

SEQ ID NO: 1505 - protein, 126 aa, synthetic construct
EVQLVESGGGVVQPGGSLRLSCAAPGDTFSENDIGWFRQAPGKEREFVAAIVWPGGETYYRDSVKGRFTLSRDNAKNTVYLQMNSLRPEDTALYYCAVKIFSKTGTYSASWEYDFWGQGTLVTVSS

SEQ ID NO: 1506 - protein, 126 aa, synthetic construct
EVQLVESGGGVVQPGGSLRLSCAASGDTFSENDIGWFRQTPGKEREFVAAIVWPGGETYYRDSVKGRFTLSRDNAKNTVYLQMNSLRPEDTALYSCAVKIFSKTGTYSASWEYDFWGQGTLVTVSS

SEQ ID NO: 1507 - protein, 126 aa, synthetic construct
EVQLVESGGGVVQPGGSLRLSCAAPGDTFSENDIGWFRQAPGKEREFVAAIVWPGGETYYRDSVKGRFTLSRDNAKNTVYLQMNSLRPEDTALYSCAVKIFSKTGTYSASWEYDFWGQGTLVTVSS

SEQ ID NO: 1508 - protein, 126 aa, synthetic construct
EVQLVESGGGVVQPGGSLRLSCAAPDDTFSENDIGWFRQTPGKEREFVAAIVWPGGETYYRDSVKGRFTLSRDNAKNTVYLQMNSLRPEDTALYSCAVKIFSKTGTYSASWEYDFWGQGTLVTVSS

SEQ ID NO: 1509 - protein, 126 aa, synthetic construct
EVQLVESGGGVVQPGGSLRLSCAAPGPTFSENDIGWFRQTPGKEREFVAAIVWPGGETYYRDSVKGRFTLSRDNAKNTVYLQMNSLRPEDTALYSCAVKIFSKTGTYSASWEYDFWGQGTLVTVSS

SEQ ID NO: 1510 - protein, 126 aa, synthetic construct
EVQLVESGGGVVQPGGSLRLSCAAPGDTFEENDIGWFRQTPGKEREFVAAIVWPGGETYYRDSVKGRFTLSRDNAKNTVYLQMNSLRPEDTALYSCAVKIFSKTGTYSASWEYDFWGQGTLVTVSS

SEQ ID NO: 1511 - protein, 126 aa, synthetic construct
EVQLVESGGGVVQPGGSLRLSCAAPGDTFSVNDIGWFRQTPGKEREFVAAIVWPGGETYYRDSVKGRFTLSRDNAKNTVYLQMNSLRPEDTALYSCAVKIFSKTGTYSASWEYDFWGQGTLVTVSS

SEQ ID NO: 1512 - protein, 126 aa, synthetic construct
EVQLVESGGGVVQPGGSLRLSCAAPGDTFSTNDIGWFRQTPGKEREFVAAIVWPGGETYYRDSVKGRFTLSRDNAKNTVYLQMNSLRPEDTALYSCAVKIFSKTGTYSASWEYDFWGQGTLVTVSS

SEQ ID NO: 1513 - protein, 126 aa, synthetic construct
EVQLVESVGGVVQPGGSLRLSCAAPGDTFAENDIGWFRQTPGKEREFVAAIVWPGGETYYRDSVKGRFTLSRDNAKNTVYLQMNSLRPEDTALYSCAVKIFSKTGTYSASWEYDFWGQGTLVTVSS

SEQ ID NO: 1514 - protein, 126 aa, synthetic construct
EVQLVESGGGVVQPGGSLRLSCAAPGDTFFENDIGWFRQTPGKEREFVAAIVWPGGETYYRDSVKGRFTLSRDNAKNTVYLQMNSLRPEDTALYSCAVKIFSKTGTYSASWEYDFWGQGTLVTVSS

SEQ ID NO: 1515 - protein, 126 aa, synthetic construct
EVQLVESGGGVVQPGGSLRLSCAAPGDTFRENDIGWFRQTPGKEREFVAAIVWPGGETYYRDSVKGRFTLSRDNAKNTVYLQMNSLRPEDTALYSCAVKIFSKTGTYSASWEYDFWGQGTLVTVSS

SEQ ID NO: 1516 - protein, 126 aa, synthetic construct
EVQLVESGGGVVQPGGSLRLSCAAPGDTFIENDIGWFRQTPGKEREFVAAIVWPGGETYYRDSVKGRFTLSRDNAKNTVYLQMNSLRPEDTALYSCAVKIFSKTGTYSASWEYDFWGQGTLVTVSS

SEQ ID NO: 1517 - protein, 126 aa, synthetic construct
EVQLVESGGGVVQPGGSLRLSCAAPGDTKSENDIGWFRQTPGKEREFVAAIVWPGGETYYRDSVKGRFTLSRDNAKNTVYLQMNSLRPEDTALYSCAVKIFSKTGTYSASWEYDFWGQGTLVTVSS

SEQ ID NO: 1518 - protein, 126 aa, synthetic construct
EVQLVESGGGVVQPGGSLRLSCAAPGDTFVENDIGWFRQTPGKEREFVAAIVWPGGETYYRDSVKGRFTLSRDNAKNTVYLQMNSLRPEDTALYSCAVKIFSKTGTYSASWEYDFWGQGTLVTVSS

SEQ ID NO: 1519 - protein, 126 aa, synthetic construct
EVQLVESGGGVVQPGGSLRLSCAAPGDTFYENDIGWFRQTPGKEREFVAAIVWPGGETYYRDSVKGRFTLSRDNAKNTVYLQMNSLRPEDTALYSCAVKIFSKTGTYSASWEYDFWGQGTLVTVSS

SEQ ID NO: 1520 - protein, 126 aa, synthetic construct
EVQLVESGGGVVQPGGSLRLSCAAPGDTFLENDIGWFRQTPGKEREFVAAIVWPGGETYYRDSVKGRFTLSRDNAKNTVYLQMNSLRPEDTALYSCAVKIFSKTGTYSASWEYDFWGQGTLVTVSS

SEQ ID NO: 1521 - protein, 126 aa, synthetic construct
EVQLVESGGGVVQPGGSLRLSCAAPGDTFTENDIGWFRQTPGKEREFVAAIVWPGGETYYRDSVKGRFTLSRDNAKNTVYLQMNSLRPEDTALYSCAVKIFSKTGTYSASWEYDFWGQGTLVTVSS

SEQ ID NO: 1522 - protein, 126 aa, synthetic construct
EVQLVESGGGVVQPGGSLRLSCAAPGDTFQENDIGWFRQTPGKEREFVAAIVWPGGETYYRDSVKGRFTLSRDNAKNTVYLQMNSLRPEDTALYSCAVKIFSKTGTYSASWEYDFWGQGTLVTVSS

SEQ ID NO: 1523 - protein, 126 aa, synthetic construct
EVQLVESGGGVVQPGGSLRLSCAAPGDTFKENDIGWFRQTPGKEREFVAAIVWPGGETYYRDSVKGRFTLSRDNAKNTVYLQMNSLRPEDTALYSCAVKIFSKTGTYSASWEYDFWGQGTLVTVSS

SEQ ID NO: 1524 - protein, 126 aa, synthetic construct
EVQLVESGGGVVQPGGSLRLSCAAPGDTFDENDIGWFRQTPGKEREFVAAIVWPGGETYYRDSVKGRFTLSRDNAKNTVYLQMNSLRPEDTALYSCAVKIFSKTGTYSASWEYDFWGQGTLVTVSS

SEQ ID NO: 1525 - protein, 126 aa, synthetic construct
EVQLVESGGGVVQPGGSLRLSCAAPGDTFGENDIGWFRQTPGKEREFVAAIVWPGGETYYRDSVKGRFTLSRDNAKNTVYLQMNSLRPEDTALYSCAVKIFSKTGTYSASWEYDFWGQGTLVTVSS

SEQ ID NO: 1526 - protein, 126 aa, synthetic construct
EVQLVESGGGVVQPGGSLRLSCAAPGDTFHENDIGWFRQTPGKEREFVAAIVWPGGETYYRDSVKGRFTLSRDNAKNTVYLQMNSLRPEDTALYSCAVKIFSKTGTYSASWEYDFWGQGTLVTVSS

SEQ ID NO: 1527 - protein, 126 aa, synthetic construct
EVQLVESGGGVVQPGGSLRLSCAAPGDTFSSNDIGWFRQTPGKEREFVAAIVWPGGETYYRDSVKGRFTLSRDNAKNTVYLQMNSLRPEDTALYSCAVKIFSKTGTYSASWEYDFWGQGTLVTVSS

SEQ ID NO: 1528 - protein, 126 aa, synthetic construct
EVQLVESGGGVVQPGGSLRLSCAAPGDTFSFNDIGWFRQTPGKEREFVAAIVWPGGETYYRDSVKGRFTLSRDNAKNTVYLQMNSLRPEDTALYSCAVKIFSKTGTYSASWEYDFWGQGTLVTVSS

SEQ ID NO: 1529 - protein, 126 aa, synthetic construct
EVQLVESGGGVVQPGGSLRLSCAAPGDTFSKNDIGWFRQTPGKEREFVAAIVWPGGETYYRDSVKGRFTLSRDNAKNTVYLQMNSLRPEDTALYSCAVKIFSKTGTYSASWEYDFWGQGTLVTVSS

SEQ ID NO: 1530 - protein, 126 aa, synthetic construct
EVQLVESGGGVVQPGGSLRLSCAAPGDTFSELDIGWFRQTPGKEREFVAAIVWPGGETYYRDSVKGRFTLSRDNAKNTVYLQMNSLRPEDTALYSCAVKIFSKTGTYSASWEYDFWGQGTLVTVSS

SEQ ID NO: 1531 - protein, 126 aa, synthetic construct
EVQLVESGGGVVQPGGSLRLSCAAPGDTFSEPDIGWFRQTPGKEREFVAAIVWPGGETYYRDSVKGRFTLSRDNAKNTVYLQMNSLRPEDTALYSCAVKIFSKTGTYSASWEYDFWGQGTLVTVSS

SEQ ID NO: 1532 - protein, 126 aa, synthetic construct
EVQLVESGGGVVQPGGSLRLSCAAPGDTFSEGDIGWFRQTPGKEREFVAAIVWPGGETYYRDSVKGRFTLSRDNAKNTVYLQMNSLRPEDTALYSCAVKIFSKTGTYSASWEYDFWGQGTLVTVSS

SEQ ID NO: 1533 - protein, 126 aa, synthetic construct
EVQLVESGGGVVQPGGSLRLSCAAPGDTFSEFDIGWFRQTPGKEREFVAAIVWPGGETYYRDSVKGRFTLSRDNAKNTVYLQMNSLRPEDTALYSCAVKIFSKTGTYSASWEYDFWGQGTLVTVSS

SEQ ID NO: 1534 - protein, 126 aa, synthetic construct
EVQLVESGGGVVQPGGSLRLSCAAPGDTFSEIDIGWFRQTPGKEREFVAAIVWPGGETYYRDSVKGRFTLSRDNAKNTVYLQMNSLRPEDTALYSCAVKIFSKTGTYSASWEYDFWGQGTLVTVSS

SEQ ID NO: 1535 - protein, 126 aa, synthetic construct
EVQLVESGGGVVQPGGSLRLSCAAPGDTFSESDIGWFRQTPGKEREFVAAIVWPGGETYYRDSVKGRFTLSRDNAKNTVYLQMNSLRPEDTALYSCAVKIFSKTGTYSASWEYDFWGQGTLVTVSS

SEQ ID NO: 1536 - protein, 126 aa, synthetic construct
EVQLVESGGGVVQPGGSLRLSCAAPGDTFSEDDIGWFRQTPGKEREFVAAIVWPGGETYYRDSVKGRFTLSRDNAKNTVYLQMNSLRPEDTALYSCAVKIFSKTGTYSASWEYDFWGQGTLVTVSS

SEQ ID NO: 1537 - protein, 126 aa, synthetic construct
EVQLVESGGGVVQPGGSLRLSCAAPGDTFSPNDIGWFRQTPGKEREFVAAIVWPGGETYYRDSVKGRFTLSRDNAKNTVYLQMNSLRPEDTALYSCAVKIFSKTGTYSASWEYDFWGQGTLVTVSS

SEQ ID NO: 1538 - protein, 126 aa, synthetic construct
EVQLVESGGGVVQPGGSLRLSCAAPGDTFSINDIGWFRQTPGKEREFVAAIVWPGGETYYRDSVKGRFTLSRDNAKNTVYLQMNSLRPEDTALYSCAVKIFSKTGTYSASWEYDFWGQGTLVTVSS

SEQ ID NO: 1539 - protein, 126 aa, synthetic construct
EVQLVESGGGVVQPGGSLRLSCAAPGDTFSGNDIGWFRQTPGKEREFVAAIVWPGGETYYRDSVKGRFTLSRDNAKNTVYLQMNSLRPEDTALYSCAVKIFSKTGTYSASWEYDFWGQGTLVTVSS

SEQ ID NO: 1540 - protein, 126 aa, synthetic construct
EVQLVESGGGVVQPGGSLRLSCAAPGDTFSQNDIGWFRQTPGKEREFVAAIVWPGGETYYRDSVKGRFTLSRDNAKNTVYLQMNSLRPEDTALYSCAVKIFSKTGTYSASWEYDFWGQGTLVTVSS

SEQ ID NO: 1541 - protein, 126 aa, synthetic construct
EVQLVESGGGVVQPGGSLRLSCAAPGDTFSRNDIGWFRQTPGKEREFVAAIVWPGGETYYRDSVKGRFTLSRDNAKNTVYLQMNSLRPEDTALYSCAVKIFSKTGTYSASWEYDFWGQGTLVTVSS

SEQ ID NO: 1542 - protein, 126 aa, synthetic construct
EVQLVESGGGVVQPGGSLRLSCAAPGDTFSLNDIGWFRQTPGKEREFVAAIVWPGGETYYRDSVKGRFTLSRDNAKNTVYLQMNSLRPEDTALYSCAVKIFSKTGTYSASWEYDFWGQGTLVTVSS

SEQ ID NO: 1543 - protein, 126 aa, synthetic construct
EVQLVESGGGVVQPGGSLRLSCAAPGDTFSHNDIGWFRQTPGKEREFVAAIVWPGGETYYRDSVKGRFTLSRDNAKNTVYLQMNSLRPEDTALYSCAVKIFSKTGTYSASWEYDFWGQGTLVTVSS

SEQ ID NO: 1544 - protein, 126 aa, synthetic construct
EVQLVESGGGVVQPGGSLRLSCAAPGDTFAENDIGWFRQTPGKEREFVAAIVWPGGETYYRDSVKGRFTLSRDNAKNTVYLQMNSLRPEDTALYSCAVKIFSKTGTYSASWEYDFWGQGTLVTVSS

SEQ ID NO: 1545 - protein, 126 aa, synthetic construct
EVQLVESGGGVVQPGGSLRLSCAAPGQTFSENDIGWFRQTPGKEREFVAAIVWPGGETYYRDSVKGRFTLSRDNAKNTVYLQMNSLRPEDTALYSCAVKIFSKTGTYSASWEYDFWGQGTLVTVSS

SEQ ID NO: 1546 - protein, 126 aa, synthetic construct
EVQLVESGGGVVQPGGSLRLSCAAPGDTFSANDIGWFRQTPGKEREFVAAIVWPGGETYYRDSVKGRFTLSRDNAKNTVYLQMNSLRPEDTALYSCAVKIFSKTGTYSASWEYDFWGQGTLVTVSS

SEQ ID NO: 1547 - protein, 126 aa, synthetic construct
EVQLVESGGGVVQPGGSLRLSCAAPGDIFSENDIGWFRQTPGKEREFVAAIVWPGGETYYRDSVKGRFTLSRDNAKNTVYLQMNSLRPEDTALYSCAVKIFSKTGTYSASWEYDFWGQGTLVTVSS

SEQ ID NO: 1548 - protein, 126 aa, synthetic construct
EVQLVESGGGVVQPGGSLRLSCAAPGDAFSENDIGWFRQTPGKEREFVAAIVWPGGETYYRDSVKGRFTLSRDNAKNTVYLQMNSLRPEDTALYSCAVKIFSKTGTYSASWEYDFWGQGTLVTVSS

SEQ ID NO: 1549 - protein, 126 aa, synthetic construct
EVQLVESGGGVVQPGGSLRLSCAAPGDEFSENDIGWFRQTPGKEREFVAAIVWPGGETYYRDSVKGRFTLSRDNAKNTVYLQMNSLRPEDTALYSCAVKIFSKTGTYSASWEYDFWGQGTLVTVSS

SEQ ID NO: 1550 - protein, 126 aa, synthetic construct
EVQLVESGGGVVQPGGSLRLSCAAPGDHFSENDIGWFRQTPGKEREFVAAIVWPGGETYYRDSVKGRFTLSRDNAKNTVYLQMNSLRPEDTALYSCAVKIFSKTGTYSASWEYDFWGQGTLVTVSS

SEQ ID NO: 1551 - protein, 126 aa, synthetic construct
EVQLVESGGGVVQPGGSLRLSCAAPGDGFSENDIGWFRQTPGKEREFVAAIVWPGGETYYRDSVKGRFTLSRDNAKNTVYLQMNSLRPEDTALYSCAVKIFSKTGTYSASWEYDFWGQGTLVTVSS

SEQ ID NO: 1552 - protein, 126 aa, synthetic construct
EVQLVESGGGVVQPGGSLRLSCAAPGDPFSENDIGWFRQTPGKEREFVAAIVWPGGETYYRDSVKGRFTLSRDNAKNTVYLQMNSLRPEDTALYSCAVKIFSKTGTYSASWEYDFWGQGTLVTVSS

SEQ ID NO: 1553 - protein, 126 aa, synthetic construct
EVQLVESGGGVVQPGGSLRLSCAAPGITFSENDIGWFRQTPGKEREFVAAIVWPGGETYYRDSVKGRFTLSRDNAKNTVYLQMNSLRPEDTALYSCAVKIFSKTGTYSASWEYDFWGQGTLVTVSS

SEQ ID NO: 1554 - protein, 126 aa, synthetic construct
EVQLVESGGGVVQPGGSLRLSCAAPGQTFSENDIGWFRQTPGKEREFVAAIVWPGGETYYRDSVKGRSTLSRDNAKNTVYLQMNSLRPEDTALYSCAVKIFSKTGTYSASWEYDFWGQGTLVTVSS

SEQ ID NO: 1555 - protein, 126 aa, synthetic construct
EVQLVESGGGVVQPGGSLRLSCAAPGGTFSENDIGWFRQTPGKEREFVAAIVWPGGETYYRDSVKGRFTLSRDNAKNTVYLQMNSLRPEDTALYSCAVKIFSKTGTYSASWEYDFWGQGTLVTVSS

SEQ ID NO: 1556 - protein, 126 aa, synthetic construct
EVQLVESGGGVVQPGGSLRLSCAAPGATFSENDIGWFRQTPGKEREFVAAIVWPGGETYYRDSVKGRFTLSRDNAKNTVYLQMNSLRPEDTALYSCAVKIFSKTGTYSASWEYDFWGQGTLVTVSS

SEQ ID NO: 1557 - protein, 126 aa, synthetic construct
EVQLVESGGGVVQPGGSLRLSCAAPGYTFSENDIGWFRQTPGKEREFVAAIVWPGGETYYRDSVKGRFTLSRDNAKNTVYLQMNSLRPEDTALYSCAVKIFSKTGTYSASWEYDFWGQGTLVTVSS

SEQ ID NO: 1558 - protein, 126 aa, synthetic construct
EVQLVESGGGVVQPGGSLRLSCAAPGFTFSENDIGWFRQTPGKEREFVAAIVWPGGETYYRDSVKGRFTLSRDNAKNTVYLQMNSLRPEDTALYSCAVKIFSKTGTYSASWEYDFWGQGTLVTVSS

SEQ ID NO: 1559 - protein, 126 aa, synthetic construct
EVQLVESGGGVVQPGGSLRLSCAAPGDFFSENDIGWFRQTPGKEREFVAAIVWPGGETYYRDSVKGRFTLSRDNAKNTVYLQMNSLRPEDTALYSCAVKIFSKTGTYSASWEYDFWGQGTLVTVSS

SEQ ID NO: 1560 - protein, 126 aa, synthetic construct
EVQLVESGGGVVQPGGSLRLSCAAPGDLFSENDIGWFRQTPGKEREFVAAIVWPGGETYYRDSVKGRFTLSRDNAKNTVYLQMNSLRPEDTALYSCAVKIFSKTGTYSASWEYDFWGQGTLVTVSS

SEQ ID NO: 1561 - protein, 126 aa, synthetic construct
EVQLVESGGGVVQPGGSLRLSCAAPGDKFSENDIGWFRQTPGKEREFVAAIVWPGGETYYRDSVKGRFTLSRDNAKNTVYLQMNSLRPEDTALYSCAVKIFSKTGTYSASWEYDFWGQGTLVTVSS

SEQ ID NO: 1562 - protein, 126 aa, synthetic construct
EVQLVESGGGVVQPGGSLRLSCAAPGDQFSENDIGWFRQTPGKEREFVAAIVWPGGETYYRDSVKGRFTLSRDNAKNTVYLQMNSLRPEDTALYSCAVKIFSKTGTYSASWEYDFWGQGTLVTVSS

SEQ ID NO: 1563 - protein, 126 aa, synthetic construct
EVQLVESGGGVVQPGGSLRLSCAAPGDVFSENDIGWFRQTPGKEREFVAAIVWPGGETYYRDSVKGRFTLSRDNAENTVYLQMNSLRPEDTALYSCAVKIFSKTGTYSASWEYDFWGQGTLVTVSS

SEQ ID NO: 1564 - protein, 126 aa, synthetic construct
EVQLVESGGGVVQPGGSLRLSCAAPGDTDSENDIGWFRQTPGKEREFVAAIVWPGGETYYRDSVKGRFTLSRDNAKNTVYLQMNSLRPEDTALYSCAVKIFSKTGTYSASWEYDFWGQGTLVTVSS

SEQ ID NO: 1565 - protein, 126 aa, synthetic construct
EVQLVESGGGVVQPGGSLRLSCAAPGDTLSENDIGWFRQTPGKEREFVAAIVWPGGETYYRDSVKGRFTLSRDNAKNTVYLQMNSLRPEDTALYSCAVKIFSKTGTYSASWEYDFWGQGTLVTVSS

SEQ ID NO: 1566 - protein, 126 aa, synthetic construct
EVQLVESGGGVVQPGGSLRLSCAAPGDTTSENDIGWFRQTPGKEREFVAAIVWPGGETYYRDSVKGRFTLSRDNAKNTVYLQMNSLRPEDTALYSCAVKIFSKTGTYSASWEYDFWGQGTLVTVSS

SEQ ID NO: 1567 - protein, 126 aa, synthetic construct
EVQLVESGGGVVQPGGSLRLSCAAPGDTISENDIGWFRQTPGKEREFVAAIVWPGGETYYRDSVKGRFTLSRDNAKNTVYLQMNSLRPEDTALYSCAVKIFSKTGTYSASWEYDFWGQGTLVTVSS

SEQ ID NO: 1568 - protein, 126 aa, synthetic construct
EVQLVESGGGVVQPGGSLRLSCAAPGDTASENDIGWFRQTPGKEREFVAAIVWPGGETYYRDSVKGRFTLSRDNAKNTVYLQMNSLRPEDTALYSCAVKIFSKTGTYSASWEYDFWGQGTLVTVSS

SEQ ID NO: 1569 - protein, 126 aa, synthetic construct
EVQLVESGGGVVQPGGSLRLSCAAPGDTESENDIGWFRQTPGKEREFVAAIVWPGGETYYRDSVKGRFTLSRDNAKNTVYLQMNSLRPEDTALYSCAVKIFSKTGTYSASWEYDFWGQGTLVTVSS

SEQ ID NO: 1570 - protein, 126 aa, synthetic construct
EVQLVESGGGVVQPGGSLRLSCAAPGDTVSENDIGWFRQTPGKEREFVAAIVWPGGETYYRDSVKGRFTLSRDNAKNTVYLQMNSLRPEDTALYSCAVKIFSKTGTYSASWEYDFWGQGTLVTVSS

SEQ ID NO: 1571 - protein, 126 aa, synthetic construct
EVQLVESGGGVVQPGGSLRLSCAAPGDTGSENDIGWFRQTPGKEREFVAAIVWPGGETYYRDSVKGRFTLSRDNAKNTVYLQMNSLRPEDTALYSCAVKIFSKTGTYSASWEYDFWGQGTLVTVSS

SEQ ID NO: 1572 - protein, 126 aa, synthetic construct
EVQLVESGGGVVQPGGSLRLSCAAPGDRFSENDIGWFRQTPGKEREFVAAIVWPGGETYYRDSVKGRFTLSRDNAKNTVYLQMNSLRPEDTALYSCAVKIFSKTGTYSASWEYDFWGQGTLVTVSS

SEQ ID NO: 1573 - protein, 126 aa, synthetic construct
EVQLVESGGGVVQPGGSLRLSCAAPGDTHSENDIGWFRQTPGKEREFVAAIVWPGGETYYRDSVKGRFTLSRDNAKNTVYLQMNSLRPEDTALYSCAVKIFSKTGTYSASWEYDFWGQGTLVTVSS

SEQ ID NO: 1574 - protein, 126 aa, synthetic construct
EVQLVESGGGVVQPGGSLRLSCAAPGDTYSENDIGWFRQTPGKEREFVAAIVWPGGETYYRDSVKGRFTLSRDNAKNTVYLQMNSLRPEDTALYSCAVKIFSKTGTYSASWEYDFWGQGTLVTVSS

SEQ ID NO: 1575 - protein, 126 aa, synthetic construct
EVQLVESGGGVVQPGGSLRLSCAAPGDTQSENDIGWFRQTPGKEREFVAAIVWPGGETYYRDSVKGRFTLSRDNAKNTVYLQMNSLRPEDTALYSCAVKIFSKTGTYSASWEYDFWGQGTLVTVSS

SEQ ID NO: 1576 - protein, 126 aa, synthetic construct
EVQLVESGGGVVQPGGSLRLSCAAPGDTSSENDIGWFRQTPGKEREFVAAIVWPGGETYYRDSVKGRFTLSRDNAKNTVYLQMNSLRPEDTALYSCAVKIFSKTGTYSASWEYDFWGQGTLVTVSS

SEQ ID NO: 1577 - protein, 126 aa, synthetic construct
EVQLVESGGGVVQPGGSLRLSCAAPGDTRSENDIGWFRQTPGKEREFVAAIVWPGGETYYRDSVKGRFTLSRDNAKNTVYLQMNSLRPEDTALYSCAVKIFSKTGTYSASWEYDFWGQGTLVTVSS

SEQ ID NO: 1578 - protein, 126 aa, synthetic construct
EVQLVESGGGVVQPGGSLRLSCAAPGDYFSENDIGWFRQTPGKEREFVAAIVWPGGETYYRDSVKGRFTLSRDNAKNTVYLQMNSLRPEDTALYSCAVKIFSKTGTYSASWEYDFWGQGTLVTVSS

SEQ ID NO: 1579 - protein, 126 aa, synthetic construct
EVQLVESGGGVVQPGGSLRLSCAAPGDSFSENDIGWFRQTPGKEREFVAAIVWPGGETYYRDSVKGRFTLSRDNAKNTVYLQMNSLRPEDTALYSCAVKIFSKTGTYSASWEYDFWGQGTLVTVSS

SEQ ID NO: 1580 - protein, 126 aa, synthetic construct
EVQLVESGGGVVQPGGSLRLSCAAPGDTFSENDIGWFRQTPGKEREFVAAIVWPGFETYYRDSVKGRFTLSRDNAKNTVYLQMNSLRPEDTALYSCAVKIFSKTGTYSASWEYDFWGQGTLVTVSS

SEQ ID NO: 1581 - protein, 126 aa, synthetic construct
EVQLVESGGGVVQPGGSLRLSCAAPGDTFSQNDIGWFRQAPGKEREFVAAIKWPGGETYYKDKVKGRFTLSRDNAKNTVYLQMNSLRPEDTALYYCAQKIFSRTGTYSASWEYDFWGQGTLVTVSS

SEQ ID NO: 1582 - protein, 126 aa, synthetic construct
EVQLVESGGGVVQPGGSLRLSCAAPGDTFSENDIGWFRQTPGKEREFVAAIVWPGLETYYRDSVKGRFTLSRDNAKNTVYLQMNSLRPEDTALYSCAVKIFSKTGTYSASWEYDFWGQGTLVTVSS

SEQ ID NO: 1583 - protein, 126 aa, synthetic construct
EVQLVESGGGVVQPGGSLRLSCAAPGDTFSENDIGWFRQTPGKEREFVAAIVWPGYETYYRDSVKGRFTLSRDNAKNTVYLQMNSLRPEDTALYSCAVKIFSKTGTYSASWEYDFWGQGTLVTVSS

SEQ ID NO: 1584 - protein, 126 aa, synthetic construct
EVQLVESGGGVVQPGGSLRLSCAAPGDTFSENDIGWFRQTPGKEREFVAAIVWPGGETYYRDSVKGRFTLSRDNAKNTVYLQMNSLRPEDTALYSCAVKIFSKLGTYSASWEYDFWGQGTLVTVSS

SEQ ID NO: 1585 - protein, 126 aa, synthetic construct
EVQLVESGGGVVQPGGSLRLSCAAPGDTFSENDIGWFRQTPGKEREFVAAIVWPGGETYYRDSVKGRFTLSRDNAKNTVYLQMNSLRPEDTALYSCAVKIFSPTGTYSASWEYDFWGQGTLVTVSS

SEQ ID NO: 1586 - protein, 126 aa, synthetic construct
EVQLVESGGGVVQPGGSLRLSCAAPGDTFSENDIGWFRQTPGKEREFVAAIVWPGGETYYRDSVKGRFTLSRDNAKNTVYLQMNSLRPEDTALYSCAVKIFSYTGTYSASWEYDFWGQGTLVTVSS

SEQ ID NO: 1587 - protein, 126 aa, synthetic construct
EVQLVESGGGVVQPGGSLRLSCAAPGDTFSENDIGWFRQTPGKEREFVAAIVWPGGETYYRDSVKGRFTLSRDNAKNTVYLQMNSLRPEDTALYSCAVKIFSSTGTYSASWEYDFWGQGTLVTVSS

SEQ ID NO: 1588 - protein, 126 aa, synthetic construct
EVQLVESGGGVVQPGGSLRLSCAAPGDTFSENDIGWFRQTPGKEREFVAAIVWPGGETYYRDSVKGRFTLSRDNAKNTVYLQMNSLRPEDTALYSCAVKIFSETGTYSASWEYDFWGQGTLVTVSS

SEQ ID NO: 1589 - protein, 126 aa, synthetic construct
EVQLVESGGGVVQPGGSLRLSCAAPGDTFSENDIGWFRQTPGKEREFVAAIVWPGGETYYRDSVKGRFTLSRDNAKNTVYLQMNSLRPEDTALYSCAVKIFSITGTYSASWEYDFWGQGTLVTVSS

SEQ ID NO: 1590 - protein, 126 aa, synthetic construct
EVQLVESGGGVVQPGGSLRLSCAAPGDTFSENDIGWFRQTPGKEREFVAAIVWPGGETYYRDSVKGRFTLSRDNAKNTVYLQMNSLRPEDTALYSCAVKIFSKVGTYSASWEYDFWGQGTLVTVSS

SEQ ID NO: 1591 - protein, 126 aa, synthetic construct
EVQLVESGGGVVQPGGSLRLSCAAPGDTFSENDIGWFRQTPGKEREFVAAIVWPGGETYYRDSVKGRFTLSRDNAKNTVYLQMNSLRPEDTALYSCAVKIFSLTGTYSASWEYDFWGQGTLVTVSS

SEQ ID NO: 1592 - protein, 126 aa, synthetic construct
EVQLVESGGGVVQPGGSLRLSCAAPGDTFSENDIGWFRQTPGKEREFVAAIVWPGGETYYRDSVKGRFTLSRDNAKNTVYLQMNSLRPEDTALYSCAVKIFSRTGTYSASWEYDFWGQGTLVTVSS

SEQ ID NO: 1593 - protein, 126 aa, synthetic construct
EVQLVESGGGVVQPGGSLRLSCAAPGDTFSENDIGWFRQTPGKEREFVAAIVWPGGETYYRDSVKGRFTLSRDNAKNTVYLQMNSLRPEDTALYSCAVKIFSHTGTYSASWEYDFWGQGTLVTVSS

SEQ ID NO: 1594 - protein, 126 aa, synthetic construct
EVQLVESGGGVVQPGGSLRLSCAAPGDTFSENDIGWFRQTPGKEREFVAAIVWPGGETYYRDSVKGRFTLSRDNAKNTVYLQMNSLRPEDTALYSCAVKIFSDTGTYSASWEYDFWGQGTLVTVSS

SEQ ID NO: 1595 - protein, 126 aa, synthetic construct
EVQLVESGGGVVQPGGSLRLSCAAPGDTFSENDIGWFRQTPGKEREFVAAIVWPGGETYYRDSVKGRFTLSRDNAKNTVYLQMNSLRPEDTALYSCAVKIFDKTGTYSASWEYDFWGQGTLVTVSS

SEQ ID NO: 1596 - protein, 126 aa, synthetic construct
EVQLVESGGGVVQPGGSLRLSCAAPGDTFSENDIGWFRQTPGKEREFVAAIVWPGGETYYRDSVKGRFTLSRDNAKNTVYLQMNSLRPEDTALYSCAVKIFGKTGTYSAGWEYDFWGQGTLVTVSS

SEQ ID NO: 1597 - protein, 126 aa, synthetic construct
EVQLVESGGGVVQPGGSLRLSCAAPGDTFSENDIGWFRQTPGKEREFVAAIVWPGGETYYRDSVKGRFTLSRDNAKNTVYLQMNSLRPEDTALYSCAVKIFFKTGTYSASWEYDFWGQGTLVTVSS

SEQ ID NO: 1598 - protein, 126 aa, synthetic construct
EVQLVESGGGVVQPGGSLRLSCAAPGDTFSENDIGWFRQTPGKEREFVAAIVWPGGETYYRDSVKGRFTLSRDNAKNTVYLQMNSLRPEDTALYSCAVKIFSTTGTYSASWEYDFWGQGTLVTVSS

SEQ ID NO: 1599 - protein, 126 aa, synthetic construct
EVQLVESGGGVVQPGGSLRLSCAAPGDTFSENDIGWFRQTPGKEREFVAAIVWPGGETYYRDSVKGRFTLSRDNAKNTVYLQMNSLRPEDTALYSCAVKIFLKTGTYSASWEYDFWGQGTLVTVSS

SEQ ID NO: 1600 - protein, 126 aa, synthetic construct
EVQLVESGGGVVQPGGSLRLSCAAPGDTFSENDIGWFRQTPGKEREFVAAIVWPGGETYYRDSVKGRFTLSRDNAKNTVYLQMNSLRPEDTALYSCAVKIFIKTGTYSASWEYDFWGQGTLVTVSS

SEQ ID NO: 1601 - protein, 126 aa, synthetic construct
EVQLVESGGGVVQPGGSLRLSCAAPGDTFSENDIGWFRQTPGKEREFVAAIVWPGGETYYRDSVKGRFTLSRDNAKNTVYLQMNSLRPEDTALYSCAVKIFSFTGTYSASWEYDFWGQGTLVTVSS

SEQ ID NO: 1602 - protein, 126 aa, synthetic construct
EVQLVESGGGVVQPGGSLRLSCAAPGDTFSENDIGWFRQTPGKEREFVAAIVWPGGETYYRDSVKGRFTLSRDNAKNTVYLQMNSLRPEDTALYSCAVKIFSVTGTYSASWEYDFWGQGTLVTVSS

SEQ ID NO: 1603 - protein, 126 aa, synthetic construct
EVQLVESGGGVVQPGGSLRLSCAAPGDTFSENDIGWFRQTPGKEREFVAAIVWPGGETYYRDSVKGRFTLSRDNAKNTVYLQMNSLRPEDTALYSCAVKIFSPTGTYSASWEYDFWGKGTLVTVSS

SEQ ID NO: 1604 - protein, 126 aa, synthetic construct
EVQLVESGGGVVQPGGSLRLSCAAPGDTFSENDIGWFRQTPGKEREFVAAIVWPGGETYYRDSVKGRFTLSRDNAKNTVYLQMNSLRPEDTALYSCAVKIFSKAGTYSASWEYDFWGQGTLVTVSS

SEQ ID NO: 1605 - protein, 126 aa, synthetic construct
EVQLVESGGGVVQPGGSLRLSCAAPGDTFSENDIGWFRQTPGKEREFVAAIVWPGGETYYRDSVKGRFTLSRDNAKNTVYLQMNSLRPEDTALYSCAVKIFSKFGTYSASWEYDFWGQGTLVTVSS

SEQ ID NO: 1606 - protein, 126 aa, synthetic construct
EVQLVESGGGVVQPGGSLRLSCAAPGDTFSENDIGWFRQTPGKEREFVAAIVWPGGETYYRDSVKGRFTLSRDNAKNTVYLQMNSLRPEDTALYSCAVKIFSKSGTYSASWEYDFWGQGTLVTVSS

SEQ ID NO: 1607 - protein, 126 aa, synthetic construct
EVQLVESGGGVVQPGGSLRLSCAAPGDTFSENDIGWFRQTPGKEREFVAAIVWPGGETYYRDSVKGRFTLSRDNAKNTVYLQMNSLRPEDTALYSCAVKIFSKGGTYSASWEYDFWGQGTLVTVSS

SEQ ID NO: 1608 - protein, 126 aa, synthetic construct
EVQLVESGGGVVQPGGSLRLSCAAPGDTFSENDIGWFRQTPGKEREFVAAIVWPGGETYYRDSVKGRFTLSRDNAKNTVYLQMNSLRPEDTALYSCAVKIFSATGTYSASWEYDFWGQGTLVTVSS

SEQ ID NO: 1609 - protein, 126 aa, synthetic construct
EVQLVESGGGVVQPGGSLRLSCAAPGDTFSENDIGWFRQTPGKEREFVAAIVWPGGETYYRDSVKGRFTLSRDNAKNTVYLQMNSLRPEDTALYSCAVKIFSKDGTYSASWEYDFWGQGTLVTVSS

SEQ ID NO: 1610 - protein, 126 aa, synthetic construct
EVQLVESGGGVVQPGGSLRLSCAAPGDTFSENDIGWFRQTPGKEREFVAAIVWPGGETYYRDSVKGRFTLSRDNAKNTVYLQMNSLRPEDTALYSCAVKIFPKTGTYSASWEYDFWGQGTLVTVSS

SEQ ID NO: 1611 - protein, 126 aa, synthetic construct
EVQLVESGGGVVQPGGSLRLSCAAPGDTFSENDIGWFRQTPGKEREFVAAIVWPGGETYYRDSVKGRFTLSRDNAKNTVYLQMNSLRPEDTALYSCAVKIFSGTGTYSASWEYDFWGQGTLVTVSS

SEQ ID NO: 1612 - protein, 126 aa, synthetic construct
EVQLVESGGGVVQPGGSLRLSCAAPGDTFSENDIGWFRQTPGKEREFVAAIVWPGGETYYRDSVKGRFTLSRDNAKNTVYLQMNSLRPEDTALYSCAVKIFSKKGTYSASWEYDFWGQGTLVTVSS

SEQ ID NO: 1613 - protein, 126 aa, synthetic construct
EVQLVESGGGVVQPGGSLRLSCAAPGDTFSENDIGWFRQTPGKEREFVAAIVWPGGETYYRDSVKGRFTLSRDNAKNTVYLQMNSLRPEDTALYSCAVKIFSKPGTYSASWEYDFWGQGTLVTVSS

SEQ ID NO: 1614 - protein, 126 aa, synthetic construct
EVQLVESGGGVVQPGGSLRLSCAAPGDTFSENDIGWFRQTPGKEREFVAAIVWPGGETYYRDSVKGRFTLSRDNAKNTVYLQMNSLRPEDTALYSCAVKIFSKHGTYSASWEYDFWGQGTLVTVSS

SEQ ID NO: 1615 - protein, 126 aa, synthetic construct
EVQLVESGGGVVQPGGSLRLSCAAPGDTFSENDIGWFRQTPGKEREFVAAIVWPGGETYYRDSVKGRFTLSRDNAKNTVYLQMNSLRPEDMALYSCAVKIFSVTGTYSASWEYDFWGQGTLVTVSS

SEQ ID NO: 1616 - protein, 126 aa, synthetic construct
EVQLVESGGGVVQPGGSLRLSCAAPGDTFSENDIGWFRQTPGKEREFVAAIVWPGGETYYRDSVKGRFTLSRDNAKNTVYLQMNSLRPEDTALYSCAVKIFSKIGTYSASWEYDFWGQGTLVTVSS

SEQ ID NO: 1617 - protein, 126 aa, synthetic construct
EVQLVESGGGVVQPGGSLRLSCAAPGDTFSENDIGWFRQTPGKEREFVAAIVWPGGETYYRDSVKGRFTLSRDNAKNTVYLQMNSLRPEDTALYSCAVKIFSKTFTYSASWEYDFWGQGTLVTVSS

SEQ ID NO: 1618 - protein, 126 aa, synthetic construct
EVQLVESGGGVVQPGGSLRLSCAAPGDTFSENDIGWFRQTPGKEREFVAAIVWPGGETYYRDSVKGRFTLSRDNAKNTVYLQMNSLRPEDTALYSCAVKIFSKQGTYSASWEYDFWGQGTLVTVSS

SEQ ID NO: 1619 - protein, 126 aa, synthetic construct
EVQLVESGGGVVQPGGSLRLSCAAPGDTFSENDIGWFRQTPGKEREFVAAIVWPGGETYYRDSVKGRFTLSRDNAKNTVYLQMNSLRPEDTALYSCAVKIKSKTGTYSASWEYDFWGQGTLVTVSS

SEQ ID NO: 1620 - protein, 126 aa, synthetic construct
EVQLVESGGGVVQPGGSLRLSCAAPGDTFSENDIGWFRQTPGKEREFVAAIVWPGGETYYRDSVKGRFTLSRDNAKNTVYLQMNSLRPEDTALYSCAVKIFYKTGTYSASWEYDFWGQGTLVTVSS

SEQ ID NO: 1621 - protein, 126 aa, synthetic construct
EVQLVESGGGVVQPGGSLRLSCAAPGDTFSENDIGWFRQTPGKEREFVAAIVWPGGETYYRDSVKGRFTLSRDNAKNTVYLQMNSLRPEDTALYSCAVKIASKTGTYSASWEYDFWGQGTLVTVSS

SEQ ID NO: 1622 - protein, 126 aa, synthetic construct
EVQLVESGGGVVQPGGSLRLSCAAPGDTFSENDIGWFRQTPGKEREFVAAIVWPGGETYYRDSVKGRFTLSRDNAKNTVYLQMNSLRPEDTALYSCAVKTFSKTGTYSASWEYDFWGQGTLVTVSS

SEQ ID NO: 1623 - protein, 126 aa, synthetic construct
EVQLVESGGGVVQPGGSLRLSCAAPGDTFSENDIGWFRQTPGKEREFVAAIVWPGGETYYRDSVKGRFTLSRDNAKNTVYLQMNSLRPEDTALYSCAVKEFSKTGTYSASWEYDFWGQGTLVTVSS

SEQ ID NO: 1624 - protein, 126 aa, synthetic construct
EVQLVESGGGVVQPGGSLRLSCAAPGDTFSENDIGRFRQTPGKEREFVAAIVWPGGETYYRDSVKGRFTLSRDNAKNTVYLQMNSLRPEDTALYSCAVKDFSKTGTYSASWEYDFWGQGTLVTVSS

SEQ ID NO: 1625 - protein, 126 aa, synthetic construct
EVQLVESGGGVVQPGGSLRLSCAAPGDTFSENDIGWFRQTPGKEREFVAAIVWPGGETYYRDSVKGRFTLSRDNAKNTVYLQMNSLRPEDTALYSCAVKQFSKTGTYSASWEYDFWGQGTLVTVSS

SEQ ID NO: 1626 - protein, 126 aa, synthetic construct
EVQLVESGGGVVQPGGSLRLSCAAPGDTFSENDIGWFRQTPGKEREFVAAIVWPGGETYYRDSVKGRFTLSRDNAKNTVYLQMNSLRPEDTALYSCAVKIRSKTGTYSASWEYDFWGQGTLVTVSS

SEQ ID NO: 1627 - protein, 126 aa, synthetic construct
EVQLVESGGGVVQPGGSLRLSCAAPGDTFSENDIGWFRQTPGKEREFVAAIVWPGGETYYRDSVKGRFTLSRDNAKNTVYLQMNSLRPEDTALYSCAVKSFSKTGTYSASWEYDFWGQGTLVTVSS

SEQ ID NO: 1628 - protein, 126 aa, synthetic construct
EVQLVESGGGVVQPGGSLRLSCAAPGDTFSENDIGWFRQTPGKEREFVAAIVWPGGETYYRDSVKGRFTLSRDNAKNTVYLQMNSLRPEDTALYSCAVKLFSKTGTYSASWEYDFWGQGTLVTVSS

SEQ ID NO: 1629 - protein, 126 aa, synthetic construct
EVQLVESGGGVVQPGGSLRLSCAAPGDTFSENDIGWFRQTPGKEREFVAAIVWPGGETYYRDSVKGRFTLSRDNAKNTVYLQMNSLRPEDTALYSCAVKKFSKTGTYSASWEYDFWGQGTLVTVSS

SEQ ID NO: 1630 - protein, 126 aa, synthetic construct
EVQLVESGGGVVQPGGSLRLSCAAPGDTFSENDIGWFRQTPGKEREFVAAIVWPGGETYYRDSVKGRFTLSRDNAKNTVYLQMNSLRPEDTALYSCAVKDFSKTGTYSSSWEYDFWGQGTLVTVSS

SEQ ID NO: 1631 - protein, 126 aa, synthetic construct
EVQLVESGGGVVQPGGSLRLSCAAPGDTFSENDIGWFRQTPGKEREFVAAIVWPGGETYYRDSVKGRFTLSRDNAKNTVYLQMNSLRPEDTALYSCAVKGFSKTGTYSASWEYDFWGQGTLVTVSS

SEQ ID NO: 1632 - protein, 126 aa, synthetic construct
EVQLVESGGGVVQPGGSLRLSCAAPGDTFSENDIGWFRQTPGKEREFVAAIVWPGGETYYRDSVKGRFTLSRDNAKNTVYLQMNSLRPEDTALYSCAVKYFSKTGTYSASWEYDFWGQGTLVTVSS

SEQ ID NO: 1633 - protein, 126 aa, synthetic construct
EVQLVESGGGVVQPGGSLRLSCAAPGDTFSENDIGWFRQTPGKEREFVAAIVWPGGETYYRDSVKGRFTLSRDNAKNTVYLQMNSLRPEDTALYSCAVKVFSKTGTYSASWEYDFWGQGTLVTVSS

SEQ ID NO: 1634 - protein, 126 aa, synthetic construct
EVQLVESGGGVVQPGGSLRLSCAAPGDTFSENDIGWFRQTPGKEREFVAAIVWPGGETYYRDSVKGRFTLSRDNAKNTVYLQMNSLRPEDTALYSCAVKFFSKTGTYSASWEYDFWGQGTLVTVSS

SEQ ID NO: 1635 - protein, 126 aa, synthetic construct
EVQLVESGGGVVQPGGSLRLSCAAPGDTFSENDIGWFRQTPGKEREFVAAIVWPGGETYYRDSVKGRFTLSRDNAKNTVYLQMNSLRPEDTALYSCAVKIFSKYGTYSASWEYDFWGQGTLVTVSS

SEQ ID NO: 1636 - protein, 126 aa, synthetic construct
EVQLVESGGGVVQPGGSLRLSCAAPGDTFSENDIGWFRQTPGKEREFVAAIVWPGGETYYRDSVKGRFTLSRDNAKNTVYLQMNSLRPEDTALYSCAVKIFGKTGTYSASWEYDFWGQGTLVTVSS

SEQ ID NO: 1637 - protein, 126 aa, synthetic construct
EVQLVESGGGVVQPGGSLRLSCAAPGDTFSENDIGWFRQTPGKEREFVAAIVWPGGETYYRDSVKGRFTLSRDNAKNTVYLQMNSLRPEDTALYSCAVKIQSKTGTYSASWEYDFWGQGTLVTVSS

SEQ ID NO: 1638 - protein, 126 aa, synthetic construct
EVQLVESGGGVVQPGGSLRLSCAAPGDTFSENDIGWFRQTPGKEREFVAAIVWPGGETYYRDSVKGRFTLSRDNAKNTVYLQMNSLRPEDTALYSCAVKIHSKTGTYSASWEYDFWGQGTLVTVSS

SEQ ID NO: 1639 - protein, 126 aa, synthetic construct
EVQLVESGGGVVQPGGSLRLSCAAPGDTFSENDIGWFRQTPGKEREFVAAIVWPGGETYYRDSVKGRFTLSRDNAKNTVYLQMNSLRPEDTALYSCAVKITSKTGTYSASWEYDFWGQGTLVTVSS

SEQ ID NO: 1640 - protein, 126 aa, synthetic construct
EVQLVESGGGVVQPGGSLRLSCAAPGDTFSENDIGWFRQTPGKEREFVAAIVWPGGETYYRDSVKGRFTLSRDNAKNTVYLQMNSLRPEDTALYSCAVKIFVKTGTYSASWEYDFWGQGTLVTVSS

SEQ ID NO: 1641 - protein, 126 aa, synthetic construct
EVQLVESGGGVVQPGGSLRLSCAAPGDTFSENDIGWFRQTPGKEREFVAAIVWPGGETYYRDSVKGRFTLSRDNAKNTVYLQMNSLRPEDTALYSCAVKIFAKTGTYSASWEYDFWGQGTLVTVSS

SEQ ID NO: 1642 - protein, 126 aa, synthetic construct
EVQLVESGGGVVQPGGSLRLSCAAPGDTFSENDIGWFRQTPGKEREFVAAIVWPGGETYYRDSVKGRFTLSRDNAKNTVYLQMNSLRPEDTALYSCAVKIFKKTGTYSASWEYDFWGQGTLVTVSS

SEQ ID NO: 1643 - protein, 126 aa, synthetic construct
EVQLVESGGGVVQLGGSLRLSCAAPGDTFSENDIGWFRQTPGKEREFVAAIVWPGGETYYRDSVKGRFTLSRDNAKNTVYLQMNSLRPEDTALYSCAVKIDSKTGTYSASWEYDFWGQGTLVTVSS

SEQ ID NO: 1644 - protein, 126 aa, synthetic construct
EVQLVESGGGVVQPGGSLRLSCAAPGDTFSENDIGWFRQTPGKEREFVAAIVWPGGETYYRDSVKGRFTLSRDNAKNTVYLQMNSLRPGDTALYSCAVKIHSKTGTYSASWEYDFWGQGTLVTVSS

SEQ ID NO: 1645 - protein, 126 aa, synthetic construct
EVQLVESGGGVVQPGGSLRLSCAAPGDTFSENDIGWFRQTPGKEREFVAAIVWPGGETYYRDSVKGRFTLSRDNAKNTVYLQMNSLRPEDTALYSCAVKIVSKTGTYSASWEYDFWGQGTLVTVSS

SEQ ID NO: 1646 - protein, 126 aa, synthetic construct
EVQLVESGGGVVQPGGSLRLSCAAPGDTFSENDIGWFRQTPGKEREFVAAIVWPGGETYYRDSVKGRFTLSRDNAKNTVYLQMNSLRPEDTALYSCAVKIFTKTGTYSASWEYDFWGQGTLVTVSS

SEQ ID NO: 1647 - protein, 126 aa, synthetic construct
EVQLVESGGGVVQPGGSLRLSCAAPGDTFSENDIGWFRQTPGKEREFVAAIVWPGGETYYRDSVKGRFTLSRDNAKNTVYLQMNSLRPEDTALYSCAVKILSKTGTYSASWEYDFWGQGTLVTVSS

SEQ ID NO: 1648 - protein, 126 aa, synthetic construct
EVQLVESGGGVVQPGGSLRLSCAAPGDTFSENDIGWFRQTPGKEREFVAAIVWPGGETYYRDSVKGRFTLSRDNAKNTVYLQMNSLRPEDTALYSCAVKIESKTGTYSASWEYDFWGQGTLVTVSS

SEQ ID NO: 1649 - protein, 126 aa, synthetic construct
EVQLVESGGGVVQPGGSLRLSCAAPGDTFSENDIGWFRQTPGKEREFVAAIVWPGGETYYRDSVKGRFTLSRDNAKNTVYLQMNSLRPEDTALYSCAVKIGSKTGTYSASWEYDFWGQGTLVTVSS

SEQ ID NO: 1650 - protein, 126 aa, synthetic construct
EVQLVESGGGVVQPGGSLRLSCAAPGDTFSENDIGWFRQTPGKEREFVAAIVWPGGETYYRDSVKGRFTLSRDNAKNTVYLQMNSLRPEDTALYSCAVKIISKTGTYSASWEYDFWGQGTLVTVSS

SEQ ID NO: 1651 - protein, 126 aa, synthetic construct
EVQLVESGGGVVQPGGSLRLSCAAPGDTFSENDIGWFRQTPGKEREFVAAIVWPGGETYYRDSVKGRFTLSRDNAKNTVYLQMNSLRPEDTALYSCAVKIYSKTGTYSASWEYDFWGQGTLVTVSS

SEQ ID NO: 1652 - protein, 126 aa, synthetic construct
EVQLVESGGGVVQPGGSLRLSCAAPGDTFSENDIGWFRQTPGKEREFVAAIVWPGGETYYRDSVKGRFTLSRDNAKNTVYLQMNSLRPEDTALYSCAVKISSKTGTYSASWEYDFWGQGTLVTVSS

SEQ ID NO: 1653 - protein, 126 aa, synthetic construct
EVQLVESGGGVVQPGGSLRLSCAAPGDTFSENDIGWFRQTPGKEREFVAAIVWPGGETYYRDSVKGRFTLSRDNAKNTVYLQMNSLRPEDTALYSCAVKIFSKTHTYSASWEYDFWGQGTLVTVSS

SEQ ID NO: 1654 - protein, 126 aa, synthetic construct
EVQLVESGGGVVQPGGSLRLSCAAPGDTFSENDIGWFRQTPGKEREFVAAIVWPGGETYYRDSVKGRFTLSRDNAKNTVYLQMNSLRPEDTALYSCAVKIFSKTYTYSASWEYDFWGQGTLVTVSS

SEQ ID NO: 1655 - protein, 126 aa, synthetic construct
EVQLVESGGGVVQPGGSLRLSCAAPGDTFSENDIGWFRQTPGKEREFVAAIVWPGGETYYRDSVKGRFTLSRDNAKNTVYLQMNSLRPEDTALYSCAVKIFSKTITYSASWEYDFWGQGTLVTVSS

SEQ ID NO: 1656 - protein, 126 aa, synthetic construct
EVQLVESGGGVVQPGGSLRLSCAAPGDTFSENDIGWFRQTPGKEREFVAAIVWPGGETYYRDSVKGRFTLSRDNAKNTVYLQMNSLRPEDTALYSCAVKIFSKTGTISASWEYDFWGQGTLVTVSS

SEQ ID NO: 1657 - protein, 126 aa, synthetic construct
EVQLVESGGGVVQPGGSLRLSCAAPGDTFSENDIGWFRQTPGKEREFVAAIVWPGGETYYRDSVKGRFTLSRDNAKNTVYLQMNSLRPEDTALYSCAVKIFSKTGTYTASWEYDFWGQGTLVTVSS

SEQ ID NO: 1658 - protein, 126 aa, synthetic construct
EVQLVESGGGVVQPGGSLRLSCAAPGDTFSENDIGWFRQTPGKEREFVAAIVWPGGETYYRDSVKGRFTLSRDNAKNTVYLQMNSLRPEDTALYSCAVKIFSKTGTASASWEYDFWGQGTLVTVSS

SEQ ID NO: 1659 - protein, 126 aa, synthetic construct
EVQLVESGGGVVQPGGSLRLSCAAPGDTFSENDIGWFRQTPGKEREFVAAIVWPGGETYYRDSVKGRFTLSRDNAKNTVYLQMNSLRPEDTALYSCAVKIFSKTGTYGASWEYDFWGQGTLVTVSS

SEQ ID NO: 1660 - protein, 126 aa, synthetic construct
EVQLVESGGGVVQPGGSLRLSCAAPGDTFSENDIGWFRQTPGKEREFVAAIVWPGGETYYRDSVKGRFTLSRDNAKNTVYLQMNSLRPEDTALYSCAVKIFSKTGTYLASWEYDFWGQGTLVTVSS

SEQ ID NO: 1661 - protein, 126 aa, synthetic construct
EVQLVESGGGVVQPGGSLRLSCAAPGDTFSENDIGWFRQTPGKEREFVAAIVWPGGETYYRDSVKGRFTLSRDNAKNTVYLQMNSLRPEDTALYSCAVKIFSKTGTYQASWEYDFWGQGTLVTVSS

SEQ ID NO: 1662 - protein, 126 aa, synthetic construct
EVQLVESGGGVVQPGGSLRLSCAAPGDTFSENDIGWFRQTPGKEREFVAAIVWPGGETYYRDSVKGRFTLSRDNAKNTVYLQMNSLRPEDTALYSCAVKIFSKTGTYAASWEYDFWGQGTLVTVSS

SEQ ID NO: 1663 - protein, 126 aa, synthetic construct
EVQLVESGGGVVQPGGSLRLSCAAPGDTFSENDIGWFRQTPGKEREFVAAIVWPGGETYYRDSVKGRFTLSRDNAKNTVYLQMNSLRPEDTALYSCAVKIFSKTGTYIASWEYDFWGQGTLVTVSS

SEQ ID NO: 1664 - protein, 126 aa, synthetic construct
EVQLVESGGGVVQPGGSLRLSCAAPGDTFSENDIGWFRQTPGKEREFVAAIVWPGGETYYRDSVKGRFTLSRDNAKNTVYLQMNSLRPEDTALYSCAVKIFSKTGTYKASWEYDFWGQGTLVTVSS

SEQ ID NO: 1665 - protein, 126 aa, synthetic construct
EVQLVESGGGVVQPGGSLRLSCAAPGDTFSENDIGWFRQTPGKEREFVAAIVWPGGETYYRDSVKGRFTLSRDNAKNTVYLQMNSLRPEDTALYSCAVKIFSKTGTYEASWEYDFWGQGTLVTVSS

SEQ ID NO: 1666 - protein, 126 aa, synthetic construct
EVQLVESGGGVVQPGGSLRLSCAAPGDTFSENDIGWFRQTPGKEREFVAAIVWPGGETYYRDSVKGRFTLSRDNAKNTVYLQMNSLRPEDTALYSCAVKIFSKTGTYHASWEYDFWGQGTLVTVSS

SEQ ID NO: 1667 - protein, 126 aa, synthetic construct
EVQLVESGGGVVQPGGSLRLSCAAPGDTFSENDIGWFRQTPGKEREFVAAIVWPGGETYYRDSVKGRFTLSRDNAKNTVYLQMNSLRPEDTALYSCAVKIFSKTGTYDASWEYDFWGQGTLVTVSS

SEQ ID NO: 1668 - protein, 126 aa, synthetic construct
EVQLVESGGGVVQPGGSLRLSCAAPGDTFSENDIGWFRQTPGKEREFVAAIVWPGGETYYRDSVKGRFTLSRDNAKNTVYLQMNSLRPEDTALYSCAVKIFSKTGTYVASWEYDFWGQGTLVTVSS

SEQ ID NO: 1669 - protein, 126 aa, synthetic construct
EVQLVESGGGVVQPGGSLRLSCAAPGDTFSENDIGWFRQTPGKEREFVAAIVWPGGETYYRDSVKGRFTLSRDNAKNTVYLQMNSLRPEDTALYSCAVKIFSKTGTQSASWEYDFWGQGTLVTVSS

SEQ ID NO: 1670 - protein, 126 aa, synthetic construct
EVQLVESGGGVVQPGGSLRLSCAAPGDTFSENDIGWFRQTPGKEREFVAAIVWPGGETYYRDSVKGRFTLSRDNAKNTVYLQMNSLRPEDTALYSCAVKIFSKTGTYRASWEYDFWGQGTLVTVSS

SEQ ID NO: 1671 - protein, 126 aa, synthetic construct
EVQLVESGGGVVQPGGSLRLSCAAPGDTFSENDIGWFRQTPGKEREFVAAIVWPGGETYYRDSVKGRFTLSRDNAKNTVYLQMNSLRPEDTALYSCAVKIFSKTGTGSASWEYDFWGQGTLVTVSS

SEQ ID NO: 1672 - protein, 126 aa, synthetic construct
EVQLVESGGGVVQPGGSLRLSCAAPGDTFSENDIGWFRQTPGKEREFVAAIVWPGGETYYRDSVKGRFTLSRDNAKNTVYLQMNSLRPEDTALYSCAVKIFSKTGTYPASWEYDFWGQGTLVTVSS

SEQ ID NO: 1673 - protein, 126 aa, synthetic construct
EVQLVESGEGVVQPGGSLRLSCAAPGDTFSENDIGWFRQTPGKEREFVAAIVWPGGETYYRDSVKGRFTLSRDNAKNTVYLQMNSLRPEDTALYSCAVKIFSKTGTYPASWEYDFWGQGTLVTVSS

SEQ ID NO: 1674 - protein, 126 aa, synthetic construct
EVQLVESGGGVVQPGGSLRLSCAAPGDTFSENDIGWFRQTPGKEREFVAAIVWPGTETYYRDSVKGRFTLSRDNAKNTVYLQMNSLRPEDTALYSCAVKIFSKTGTYSASWEYDFWGQGTLVTVSS

SEQ ID NO: 1675 - protein, 126 aa, synthetic construct
EVQLVESGGGVVQPGGSLRLSCAAPGDTFSENDIGWFRQTPGKEREFVAAIVWPGPETYYRDSVKGRFTLSRDNAKNTVYLQMNSLRPEDTALYSCAVKIFSKTGTYSASWEYDFWGQGTLVTVSS

SEQ ID NO: 1676 - protein, 126 aa, synthetic construct
EVQLVESGGGVVQPGGSLRLSCAAPGDTFSENDIGWFRQTPGKEREFVAAIVWPGGETYYRDSVKGRFTFSRDNAKNTVYLQMNSLRPEDTALYSCAVKIFSKTGTYSHSWEYDFWGQGTLVTVSS

SEQ ID NO: 1677 - protein, 126 aa, synthetic construct
EVQLVESGGGVVQPGGSLRLSCAAPGDTFSENDIGWFRQTPGKEREFVAAIVWPGGETYYRDSVKGRFTLSRDNAKNTVYLQMNSLRPEDTALYSCAVKIFSKTGTYSYSWEYDFWGQGTLVTVSS

SEQ ID NO: 1678 - protein, 126 aa, synthetic construct
EVQLVESGGGVVQPGGSLRLSCAAPGDTFSENDIGWFRQTPGKEREFVAAIVWPGGETYYRDSVKGRFTLSRDNAKNTVYLQMNSLRPEDTALYSCAVKIFSKTGTYSVSWEYDFWGQGTLVTVSS

SEQ ID NO: 1679 - protein, 126 aa, synthetic construct
EVQLVESGGGVVQPGGSLRLSCAAPGDTFSENDIGRFRQTPGKEREFVAAIVWPGGETYYRDSVKGRFTLSRDNAKNTVYLQMNSLRPEDTALYSCAVKIFSKTGTYLASWEYDFWGQGTLVTVSS

SEQ ID NO: 1680 - protein, 126 aa, synthetic construct
EVQLVESGGGVVQPGGSLRLSCAAPGDTFSENDIGWFRQTPGKEREFVAAIVWPGGETYYRDSVKGRFTLSRDNAKNTVYLQMNSLRPEDTALYSCAVKIFSKTGTYFASWEYDFWGQGTLVTVSS

SEQ ID NO: 1681 - protein, 126 aa, synthetic construct
EVQLVESGGGVVQPGGSLRLSCAAPGDTFSENDIGWFRQTPGKEREFVAAIVWPGGETYYRDSVKGRFTLSRDNAKNTVYLQMNSLRPEDTALYSCAVKIFSKTGTYSRSWEYDFWGQGTLVTVSS

SEQ ID NO: 1682 - protein, 126 aa, synthetic construct
EVQLVESGGGVVQPGGSLRLSCAAPGDTFSENDIGWFRQTPGKEREFVAAIVWPGGETYYRDSVKGRFTLSRDNAKNTVYLQMNSLRPEDTALYSCAVKIFSKTGTYSFSWEYDFWGQGTLVTVSS

SEQ ID NO: 1683 - protein, 126 aa, synthetic construct
EVQLVESGGGVVQPGGSLRLSCAAPGDTFSENDIGWFRQTPGKEREFVAAIVWPGGETYYRDSVKGRFTLSRDNAKNTVYLQMNSLRPEDTALYSCAVKIFSKTGTYSGSWEYDFWGQGTLVTVSS

SEQ ID NO: 1684 - protein, 126 aa, synthetic construct
EVQLVESGGGVVQPGGSLRLSCAAPGDTFSENDIGWFRQTPGKEREFVAAIVWPGGETYYRDSVKGRFTLSRDNAKNTVYLQMNSLRPEDTALYSCAVKIFSKTGTYSSSWEYDFWGQGTLVTVSS

SEQ ID NO: 1685 - protein, 126 aa, synthetic construct
EVQLVESGGGVVQPGGSLRLSCAAPGDTFSENDIGWFRQTPGKEREFVAAIVWPGGETYYRDSVKGRFTLSRDNAKNTVYLQMNSLRPEDTALYSCAVKIFSKTGTYSLSWEYDFWGQGTLVTVSS

SEQ ID NO: 1686 - protein, 126 aa, synthetic construct
EVQLVESGGGVVQPGGSLRLSCAAPGDTFSENDIGWFRQTPGKEREFVAAIVWPGGETYYRDSVKGRFTLSRDNAKNTVYLQMNSLRPEDTALYSCAVKIFSKTGTYSDSWEYDFWGQGTLVTVSS

SEQ ID NO: 1687 - protein, 126 aa, synthetic construct
EVQLVESGGGVVQPGGSLRLSCAAPGDTFSENDIGWFRQTPGKEREFVAAIVWPGGETYYRDSVKGRFTLSRDNAKNTVYLQMNSLRPEDTALYSCAVKIFSKTGTYYASWEYDFWGQGTLVTVSS

SEQ ID NO: 1688 - protein, 126 aa, synthetic construct
EVQLVESGGGVVQPGGSLRLSCAAPGDTFSENDIGWFRQTPGKEREFVAAIVWPGGETYYRDSVKGRFTLSRDNAKNTVYLQMNSLRPEDTALYSCAVKIFSKTGTYSESWEYDFWGQGTLVTVSS

SEQ ID NO: 1689 - protein, 126 aa, synthetic construct
EVQLVESGGGVVQPGGSLRLSCAAPGDTFSENDIGWFRQTPGKEREFVAAIVWPGGETYYRDSVKGRFTLSRDNAKNTVYLQMNSLRPEDTALYSCAVKIFSKTGTESASWEYDFWGQGTLVTVSS

SEQ ID NO: 1690 - protein, 126 aa, synthetic construct
EVQLVESGGGVVQPGGSLRLSCAAPGDTFSENDIGWFRQTPGKEREFVAAIVWPGGETYYRDSVKGRFTLSRDNAKNTVYLQMNSLRPEDTALYSCAVKIFSKTGTFSASWEYDFWGQGTLVTVSS

SEQ ID NO: 1691 - protein, 126 aa, synthetic construct
EVQLVESGGGVVQPGGSLRLSCAAPGDTFSENDIGWFRQTPGKEREFVAAIVWPGGETYYRDSVKGRFTLSRDNAKNTVYLQMNSLRPEDTALYSCAVKIFSKTGTDSASWEYDFWGQGTLVTVSS

SEQ ID NO: 1692 - protein, 126 aa, synthetic construct
EVQLVESGGGVVQPGGSLRLSCAAPGDTFSENDIGWFRQTPGKEREFVAAIVWPGGETYYRDSVKGRFTLSRDNAKNTVYLQMNSLRPEDTALYSCAVKIFSKTGGYSASWEYDFWGQGTLVTVSS

SEQ ID NO: 1693 - protein, 126 aa, synthetic construct
EVQLVESGGGVVQPGGSLRLSCAAPGDTFSENDIGWFRQTPGKEREFVAAIVWPGGETYYRDSVKGRFTLSRDNAKNTVYLQMNSLRPEDTALYSCAVKIFSKTLTYSASWEYDFWGQGTLVTVSS

SEQ ID NO: 1694 - protein, 126 aa, synthetic construct
EVQLVESGGGVVQPGGSLRLSCAAPGDTFSENDIGWFRQTPGKEREFVAAIVWPGGETYYRDSVKGRFTLSRDNAKNTVYLQMNSLRPEDTALYSCAVKIFSKTTTYSASWEYDFWGQGTLVTVSS

SEQ ID NO: 1695 - protein, 126 aa, synthetic construct
EVQLVESGGGVVQPGGSLRLSCAAPGDTFSENDIGWFRQTPGKEREFVAAIVWPGGETYYRDSVKGRFTLSRDNAKNTVYLQMNSLRPEDTALYSCAVKIFSKTETYSASWEYDFWGQGTLVTVSS

SEQ ID NO: 1696 - protein, 126 aa, synthetic construct
EVQLVESGGGVVQPGGSLRLSCAAPGDTFSENDIGWFRQTPGKEREFVAAIVWPGGETYYRDSVKGRFTLSRDNAKNTVYLQMNSLRPEDTALYSCAVKIFSKTPTYSASWEYDFWGQGTLVTVSS

SEQ ID NO: 1697 - protein, 126 aa, synthetic construct
EVQLVESGGGVVQPGGSLRLSCAAPGDTFSENDIGWFRQTPGKEREFVAAIVWPGGETYYRDSVKGRFTLSRDNTKNTVYLQMNSLRPEDTALYSCAVKIFSKTPTYSASWEYDFWGQGTLVTVSS

SEQ ID NO: 1698 - protein, 126 aa, synthetic construct
EVQLVESGGGVVQPGGSLRLSCAAPGDTFSENDIGWFRQTPGKEREFVAAIVWPGGETYYRDSVKGRFTLSRDNAKNTVYLQMNSLRPEDTALYSCAVKIFSKTRTYSASWEYDFWGQGTLVTVSS

SEQ ID NO: 1699 - protein, 126 aa, synthetic construct
EVQLVESGGGVVQPGGSLRLSCAAPGDTFSENDIGWFRQTPGKEREFVAAIVWPGGETYYRDSVKGRFTLSRDNAKNTVYLQMNSLRPEDTALYSCAVKIFSKTGVYSASWEYDFWGQGTLVTVSS

SEQ ID NO: 1700 - protein, 126 aa, synthetic construct
EVQLVESGGGVVQPGGSLRLSCAAPGDTFSENDIGWFRQTPGKEREFVAAIVWPGGETYYRDSVKGRFTLSRDNAKNTVYLQMNSLRPEDTALYSCAVKIFSKTGSYSASWEYDFWGQGTLVTVSS

SEQ ID NO: 1701 - protein, 126 aa, synthetic construct
EVQLVESGGGVVQPGGSLRLSCAAPGDTFSENDIGWFRQTPGKEREFVAAIVWPGGETYYRDSVKGRFTLSRDNAKNTVYLQMNSLRPEDTALYSCAVKIFSKTSTYSASWEYDFWGQGTLVTVSS

SEQ ID NO: 1702 - protein, 126 aa, synthetic construct
EVQLVESGGGVVQPGGSLRLSCAAPGDTFSENDIGWFRQTPGKEREFVAAIVWPGGETYYRDSVKGRFTLSRDNAKNTVYLQMNSLRPEDTALYSCAVKIFSKTQTYSASWEYDFWGQGTLVTVSS

SEQ ID NO: 1703 - protein, 126 aa, synthetic construct
EVQLVESGGGVVQPGGSLRLSCAAPGDTFSENDIGWFRQTPGKEREFVAAIVWPGGETYYRDSVKGRFTLSRDNAKNTVYLQMNSLRPEDTALYSCAVKIFSKTDTYSASWEYDFWGQGTLVTVSS

SEQ ID NO: 1704 - protein, 126 aa, synthetic construct
EVQLVESGGGVVQPGGSLRLSCAAPGDTFSENDIGWFRQTPGKEREFVAAIVWPGGETYYRDSVKGRFTLSRDNAKNTVYLQMNSLRPEDTALYSCAVKIFSKTKTYSASWEYDFWGQGTLVTVSS

SEQ ID NO: 1705 - protein, 126 aa, synthetic construct
EVQLVESGGGVVQPGGSLRLSCAAPGDTFSENDIGWFRQTPGKEREFVAAIVWPGGETYYRDSVKGRFTLSRDNAKNTVYLQMNSLRPEDTALYSCAVKIFSKTATYSASWEYDFWGQGTLVTVSS

SEQ ID NO: 1706 - protein, 126 aa, synthetic construct
EVQLVESGGGVVQPGGSLRLSCAAPGDTFSENDIGWFRQTPGKEREFVAAIVWPGGETYYRDSVKGRFTLSRDNAKNTVYLQMNSLRPEDTALYSCAVKIFSKTGEYSASWEYDFWGQGTLVTVSS

SEQ ID NO: 1707 - protein, 126 aa, synthetic construct
EVQLVESGGGVVQPGGSLRLSCAAPGDTFSENDIGWFRQTPGKEREFVAAIVWPGGETYYRDSVKGRFTLSRDNAKNTVYLQMNSLRPEDTALYSCAVKIFSKTGTKSASWEYDFWGQGTLVTVSS

SEQ ID NO: 1708 - protein, 126 aa, synthetic construct
EVQLVESGGGVVQPGGSLRLSCAAPGDTFSENDIGWFRQTPGKEREFVAAIVWPGGETYYRDSVKGRFTLSRDNAKNTVYLQMNSLRPEDTALYSCAVKIFSKTGTLSASWEYDFWGQGTLVTVSS

SEQ ID NO: 1709 - protein, 126 aa, synthetic construct
EVQLVESGGGVVQPGGSLRLSCAAPGDTFSENDIGWFRQTPGKEREFVAAIVWPGGETYYRDSVKGRFTLSRDNAKNTVYLQMNSLRPEDTALYSCAVKIFSKTGQYSASWEYDFWGQGTLVTVSS

SEQ ID NO: 1710 - protein, 126 aa, synthetic construct
EVQLVESGGGVVQPGGSLRLSCAAPGDTFSENDIGWFRQTPGKEREFVAAIVWPGGETYYRDSVKGRFTLSRDNAKNTVYLQMNSLRPEDTALYSCAVKIFSKTGTSSASWEYDFWGQGTLVTVSS

SEQ ID NO: 1711 - protein, 126 aa, synthetic construct
EVQLVESGGGVVQPGGSLRLSCAAPGDTFSENDIGWFRQTPGKEREFVAAIVWPGGETYYRDSVKGRFTLSRDNAKNTVYLQMNSLRPEDTALYSCAVKIFSKTGLYSASWEYDFWGQGTLVTVSS

SEQ ID NO: 1712 - protein, 126 aa, synthetic construct
EVQLVESGGGVVQPGGSLRLSCAAPGDTFSENDIGWFRQTPGKEREFVAAIVWPGGETYYRDSVKGRFTLSRDNAKNTVYLQMNSLRPEDTALYSCAVKIFSKTGHYSASWEYDFWGQGTLVTVSS

SEQ ID NO: 1713 - protein, 126 aa, synthetic construct
EVQLVESGGGVVQPGGSLRLSCAAPGDTFSENDIGWFRQTPGKEREFVAAIVWPGGETYYRDSVKGRFTLSRDNAKNTVYLQMNSLRPEDTALYSCAVKIFSKTGTTSASWEYDFWGQGTLVTVSS

SEQ ID NO: 1714 - protein, 126 aa, synthetic construct
EVQLVESGGGVVQPGGSLRLSCAAPGDTFSENDIGWFRQTPGKEREFVAAIVWPGGETYYRDSVKGRFTLSRDNAKNTVYLQMNSLRPEDTALYSCAVKIFSKTGTVSASWEYDFWGQGTLVTVSS

SEQ ID NO: 1715 - protein, 126 aa, synthetic construct
EVQLVESGGGVVQPGGSLRLSCAAPGDTFSENDIGWFRQTPGKEREFVAAIVWPGGETYYRDSVKGRFTLSRDNAKNTVYLQMNSLRPEDTALYSCAVKIFSKTGTRSASWEYDFWGQGTLVTVSS

SEQ ID NO: 1716 - protein, 126 aa, synthetic construct
EVQLVESGGGVVQPGGSLRLSCAAPGDTFSENDIGWFRQTPGKEREFVAAIVWPGGETYYRDSVKGRFTLSRDNAKNTVYLQMNSLRPEDTALYSCAVKIFSKTGRYSASWEYDFWGQGTPVTVSS

SEQ ID NO: 1717 - protein, 126 aa, synthetic construct
EVQLVESGGGVVQPGGSLRLSCAAPGDTFSENDIGWFRQTPGKEREFVAAIVWPGGETYYRDSVKGRFTLSRDNAKNTVYLQMNSLRPEDTALYSCAVKIFSKTGPYSASWEYDFWGQGTLVTVSS

SEQ ID NO: 1718 - protein, 126 aa, synthetic construct
EVQLVESGGGVVQPGGSLRLSCAAPGDTFSENDIGWFRQTPGKEREFVAAIVWPGGETYYRDSVKGRFTLSRDNAKNTVYLQMNSLRPEDTALYSCAVKIFSKTGAYSASWEYDFWGQGTLVTVSS

SEQ ID NO: 1719 - protein, 126 aa, synthetic construct
EVQLVESGGGVVQPGGSLRLSCAAPGDTFSENDIGWFRQTPGKEREFVAAIVWPGGETYYRDSVKGRFTLSRDNAKNTVYLQMSSLRPEDTALYSCAVKIFSKTGHYSASWEYDFWGQGTLVTVSS

SEQ ID NO: 1720 - protein, 126 aa, synthetic construct
EVQLVESGGGVVQPGGSLRLSCAAPGDTFSENDIGWFRQTPGKEREFVAAIVWPGGETYYRDSVKGRFTLSRDNAKNTVYLQMNSLRPEDTALYSCAVKIFSKTGFYSASWEYDFWGQGTLVTVSS

SEQ ID NO: 1721 - protein, 126 aa, synthetic construct
EVQLVESGGGVVQPGGSLRLSCAAPGDTFSENDIGWFRQTPGKEREFVAAIVWPGGETYYRDSVKGRFTLSRDNAKNTVYLQMNSLRPEDTALYSCAVKIFSKTGKYSASWEYDFWGQGTLVTVSS

SEQ ID NO: 1722 - protein, 126 aa, synthetic construct
EVQLVESGGGVVQPGGSLRLSCAAPGDTFSENDIGWFRQTPGKEREFVAAIVWPGGETYYRDSVKGRFTLSRDNAKNTVYLQMNSLRPEDTALYSCAVKIFSKTGIYSASWEYDFWGQGTLVTVSS

SEQ ID NO: 1723 - protein, 126 aa, synthetic construct
EVQLVESGGGVVQPGGSLRLSCAAPGDTFSENDIGWFRQTPGKEREFVAAIVWPGGETYYRDSVKGRFTLSRDNAKNTVYLQMNSLRPEDTALYSCAVKIFSKTGYYSASWEYDFWGQGTLVTVSS

SEQ ID NO: 1724 - protein, 126 aa, synthetic construct
EVQLVESGGGVVQPGGSLRLSCAAPGDTFSENDIGWFRQTPGKEREFVAAIVWPGGETYYRDSVKGRFTLSRDNAKNTVYLQMNSLRPEDTALYSCAVKIFSKTGRYSASWEYDFWGQGTLVTVSS

SEQ ID NO: 1725 - protein, 126 aa, synthetic construct
EVQLVESGGGVVQPGGSLRLSCAAPGDTFSENDIGWFRQTPGKEREFVAAIVWPGGETYYRDSVKGRFTLSRDNAKNTVYLQMNSLRPEDTALYSCAVKRFSKTGTYSASWEYDFWGQGTLVTVSS

SEQ ID NO: 1726 - protein, 126 aa, synthetic construct
EVQLVESGGGVVQPGGSLRLSCAAPGDTFSENDIGWFRQTPGKEREFVAAIVWPGAETYYRDSVKGRFTLSRDNAKNTVYLQMNSLRPEDTALYSCAVKIFSKTGTYSASWEYDFWGQGTLVTVSS

SEQ ID NO: 1727 - protein, 126 aa, synthetic construct
EVQLVESGGGVVQPGGSLRLSCAAPGDTFSENDIGWFRQTPGKEREFVAAIVWPGGETYYRDSVKGRFTLSRDNAKNTVYLQMNSLRPEDTALYSCAVKAFSKTGTYSASWEYDFWGQGTLVTVSS

SEQ ID NO: 1728 - protein, 126 aa, synthetic construct
EVQLVESGGGVVQPGGSLRLSCAAPGDTFSENDITWFRQTPGKEREFVAAIVWPGGETYYRDSVKGRFTLSRDNAKNTVYLQMNSLRPEDTALYSCAVKIFSKTGTYSASWEYDFWGQGTLVTVSS

SEQ ID NO: 1729 - protein, 126 aa, synthetic construct
EVQLVESGGGVVQPGGSLRLSCAAPGDTFSENDIGWFRQTPGKEREFVAAIVWPGGETYYTDSVKGRFTLSRDNAKNTVYLQMNSLRPEDTALYSCAVKIFSKTGTYSASWEYDFWGQGTLVTVSS

SEQ ID NO: 1730 - protein, 126 aa, synthetic construct
EVQLVESGGGVVQPGGSLRLSCAAPGDTFSENDIGWFRQTPGKEREFVAAIVWPGGETIYRDSVKGRFTLSRDNAKNTVYLQMNSLRPEDTALYSCAVKIFSKTGTYSASWEYDFWGQGTLVTVSS

SEQ ID NO: 1731 - protein, 126 aa, synthetic construct
EVQLVESGGGVVQPGGSLRLSCAAPGDTFSENDIGWFRQTPGKEREFVAAIVWPGGETLYRDSVKGRFTLSRDNAKNTVYLQMNSLRPEDTALYSCAVKIFSKTGTYSASWEYDFWGQGTLVTVSS

SEQ ID NO: 1732 - protein, 126 aa, synthetic construct
EVQLVESGGGVVQPGGSLRLSCAAPGDTFSENDIGWFRQTPGKEREFVAAIVWPGGETEYRDSVKGRFTLSRDNAKNTVYLQMNSLRPEDTALYSCAVKIFSKTGTYSASWEYDFWGQGTLVTVSS

SEQ ID NO: 1733 - protein, 126 aa, synthetic construct
EVQLVESGGGVVQPGGSLRLSCAAPGDTFSENDIGWFRQTPGKEREFVAAIVWPGGETDYRDSVKGRFTLSRDNAKNTVYLQMNSLRPEDTALYSCAVKIFSKTGTYSASWEYDFWGQGTLVTVSS

SEQ ID NO: 1734 - protein, 126 aa, synthetic construct
EVQLVESGGGVVQPGGSLRLSCAAPGDTFSENDIGWFRQTPGKEREFVAAIVWPGGETHYRDSVKGRFTLSRDNAKNTVYLQMNSLRPEDTALYSCAVKIFSKTGTYSASWEYDFWGQGTLVTVSS

SEQ ID NO: 1735 - protein, 126 aa, synthetic construct
EVQLVESGGGVVQPGGSLRLSCAAPGDTFSENDIGWFRQTPGKEREFVAAIVWPGGETYYGDSVKGRFTLSRDNAKNTVYLQMNSLRPEDTALYSCAVKIFSKTGTYSASWEYDFWGQGTLVTVSS

SEQ ID NO: 1736 - protein, 126 aa, synthetic construct
EVQLVESGGGVVQPGGSLRLSCAAPGDTFSENDIGWFRQTPGKEREFVAAIVWPGGETKYRDSVKGRFTLSRDNAKNTVYLQMNSLRPEDTALYSCAVKIFSKTGTYSASWEYDFWGQGTLVTVSS

SEQ ID NO: 1737 - protein, 126 aa, synthetic construct
EVQLVESGGGVVQPGGSLRLSCAAPGDTFSENDIGWFRQTPGKEREFVAAIVWPGGEEYYRDSVKGRFTLSRDNAKNTVYLQMNSLRPEDTALYSCAVKIFSKTGTYSASWEYDFWGQGTLVTVSS

SEQ ID NO: 1738 - protein, 126 aa, synthetic construct
EVQLVESGGGVVQPGGSLRLSCAAPGDTFSENDIGWFRQTPGKEREFVAAIVWPGGELYYRDSVKGRFTLSRDNAKNTVYLQMNSLRPEDTALYSCAVKIFSKTGTYSAGWEYDFWGQGTLVTVSS

SEQ ID NO: 1739 - protein, 126 aa, synthetic construct
EVQLVESGGGVVQPGGSLRLSCAAPGDTFSENDIGWFRQTPGKEREFVAAIVWPGGEYYYRDSVKGRFTLSRDNAKNTVYLQMNSLRPEDTALYSCAVKIFSKTGTYSASWEYDFWGQGTLVTVSS

SEQ ID NO: 1740 - protein, 126 aa, synthetic construct
EVQLVESGGGVVQPGGSLRLSCAAPGDTFSENDIGWFRQTPGKEREFVAAIVWPGGEFYYRDSVKGRFTLSRDNAKNTVYLQMNSLRPEDTALYSCAVKIFSKTGTYSASWEYDFWGQGTLVTVSS

SEQ ID NO: 1741 - protein, 126 aa, synthetic construct
EVQLVESGGGVVQPGGSLRLSCAAPGDTFSENDIGWFRQTPGKEREFVAAIVWPGGEPYYRDSVKGRFTLSRDNAKNTVYLQMNSLRPEDTALYSCAVKIFSKTGTYSASWEYDFWGQGTLVTVSS

SEQ ID NO: 1742 - protein, 126 aa, synthetic construct
EVQLVESGGGVVQPGGSLRLSCAAPGDTFSENDIGWFRQTPGKEREFVAAIVWPGGEQYYRDSVKGRFTLSRDNAKNTVYLQMNSLRPEDTALYSCAVKIFSKTGTYSASWEYDFWGQGTLVTVSS

SEQ ID NO: 1743 - protein, 126 aa, synthetic construct
EVQLVESGGGVVQPGGSLRLSCAAPGDTFSENDIGWFRQTPGKEREFVAAIVWPGGETAYRDSVKGRFTLSRDNAKNTVYLQMNSLRPEDTALYSCAVKIFSKTGTYSASWEYDFWGQGTLVTVSS

SEQ ID NO: 1744 - protein, 126 aa, synthetic construct
EVQLVESGGGVVQPGGSLRLSCAAPGDTFSENDIGWFRQTPGKEREFVAAIVWPGGEIYYRDSVKGRFTLSRDNAKNTVYLQMNSLRPEDTALYSCAVKIFSKTGTYSASWEYDFWGQGTLVTVSS

SEQ ID NO: 1745 - protein, 126 aa, synthetic construct
EVQLVESGGGVVQPGGSLRLSCAAPGDTFSENDIGWFRQTPGKEREFVAAIVWPGGEIYYRDSVKGRFTLSRDNAKNTVYLQMNSLRPEDTAMYSCAVKIFSKTGTYSASWEYDFWGQGTLVTVSS

SEQ ID NO: 1746 - protein, 126 aa, synthetic construct
EVQLVESGGGVVQPGGSLRLSCAAPGDTFSENDIGWFRQTPGKEREFVAAIVWPGGETFYRDSVKGRFTLSRDNAKNTVYLQMNSLRPEDTALYSCAVKIFSKTGTYSASWEYDFWGQGTLVTVSS

SEQ ID NO: 1747 - protein, 126 aa, synthetic construct
EVQLVESGGGVVQPGGSLRLSCAAPGDTFSENDIGWFRQTPGKEREFVAAIVWPGGETFYRDSVKGRFTLSRDNAKNTVYLQMNSLRPEDTDLYSCAVKIFSKTGTYSASWEYDFWGQGTLVTVSS

SEQ ID NO: 1748 - protein, 126 aa, synthetic construct
EVQLVESGGGVVQPGGSLRLSCAAPGDTFSENDIGWFRQTPGKEREFVAAIVWPGGETSYRDSVKGRFTLSRDNAKNTVYLQMNSLRPEDTALYSCAVKIFSKTGTYSASWEYDFWGQGTLVTVSS

SEQ ID NO: 1749 - protein, 126 aa, synthetic construct
EVQLVESGGGVVQPGGSLRLSCAAPGDTFSENDIGWFRQTPGKEREFVAAIVWPGGETYYSDSVKGRFTLSRDNAKNTVYLQMNSLRPEDTALYSCAVKIFSKTGTYSASWEYDFWGQGTLVTVSS

SEQ ID NO: 1750 - protein, 126 aa, synthetic construct
EVQLVESGGGVVQPGGSLRLSCAAPGDTFSENDIGWFRQTPGKEREFVAAIVWPGGETYYKDSVKGRFTLSRDNAKNTVYLQMNSLRPEDTALYSCAVKIFSKTGTYSASWEYDFWGQGTLVTVSS

SEQ ID NO: 1751 - protein, 126 aa, synthetic construct
EVQLVESGGGVVQPGGSLRLSCAAPGDTFSENDIGWFRQTPGKEREFVAAIVWPGGETYYYDSVKGRFTLSRDNAKNTVYLQMNSLRPEDTALYSCAVKIFSKTGTYSASWEYDFWGQGTLVTVSS

SEQ ID NO: 1752 - protein, 126 aa, synthetic construct
EVQLVESGGGVVQPGGSLRLSCAAPGDTFSENDIGWFRQTPGKEREFVAAIVWPGGETYYHDSVKGRFTLSRDNAKNTVYLQMNSLRPEDTALYSCAVKIFSKTGTYSASWEYDFWGQGTLVTVSS

SEQ ID NO: 1753 - protein, 126 aa, synthetic construct
EVQLVESGGGVVQPGGSLRLSCAAPGDTFSENDIGWFRQTPGKEREFVAAIVWPGGETRYRDSVKGRFTLSRDNAKNTVYLQMNSLRPEDTALYSCAVKIFSKTGTYSASWEYDFWGQGTLVTVSS

SEQ ID NO: 1754 - protein, 126 aa, synthetic construct
EVQLVESGGGVVQPGGSLRLSCAAPGDTFSENDIGWFRQTPGKEREFVAAIVWPGGETYYQDSVKGRFTLSRDNAKNTVYLQMNSLRPEDTALYSCAVKIFSKTGTYSASWEYDFWGQGTLVTVSS

SEQ ID NO: 1755 - protein, 126 aa, synthetic construct
EVQLVESGGGVVQPGGSLRLSCAAPGDTFSENDIGWFRQTPGKEREFVAAIVWPGGERYYRDSVKGRFTLSRDNAKNTVYLQMNSLRPEDTALYSCAVKIFSKTGTYSASWEYDFWGQGTLVTVSS

SEQ ID NO: 1756 - protein, 126 aa, synthetic construct
EVQLVESGGGVVQPGGSLRLSCAAPGDTFSENDIGWFRQTPGKEREFVAAIVWPGGETGYRDSVKGRFTLSRDNAKNTVYLQMNSLRPEDTALYSCAVKIFSKTGTYSASWEYDFWGQGTLVTVSS

SEQ ID NO: 1757 - protein, 126 aa, synthetic construct
EVQLVESGGGVVQPGGSLRLSCAAPGDTFSENDIGWFRQTPGKEREFVAAIVWPGGETSYRDSVKGRFTLSRDNAKNTVYLQMNSLRPEDTALYSCAVKIFSKTDTYSASWEYDFWGQGTLVTVSS

SEQ ID NO: 1758 - protein, 126 aa, synthetic construct
EVQLVESGGGVVQPGGSLRLSCAAPGDTFSENDIGWFRQTPGKEREFVAAIVWPGGETPYRDSVKGRFTLSRDNAKNTVYLQMNSLRPEDTALYSCAVKIFSKTGTYSASWEYDFWGQGTLVTVSS

SEQ ID NO: 1759 - protein, 126 aa, synthetic construct
EVQLVESGGGVVQPGGSLRLSCAAPGDTFSENDIGWFRQTPGKEREFVAAIVWPGGETTYRDSVKGRFTLSRDNAKNTVYLQMNSLRPEDTALYSCAVKIFSKTGTYSASWEYDFWGQGTLVTVSS

SEQ ID NO: 1760 - protein, 126 aa, synthetic construct
EVQLVESGGGVVQPGGSLRLSCAAPGDTFSENDIGWFRQTPGKEREFVAAIVWPGGETQYRDSVKGRFTLSRDNAKNTVYLQMNSLRPEDTALYSCAVKIFSKTGTYSASWEYDFWGQGTLVTVSS

SEQ ID NO: 1761 - protein, 126 aa, synthetic construct
EVQLVESGGGVVQPGGSLRLSCAAPGDTFSENDIGWFRQTPGKEREFVAAIVWPGGETYYPDSVKGRFTLSRDNAKNTVYLQMNSLRPEDTALYSCAVKIFSKTGTYSASWEYDFWGQGTLVTVSS

SEQ ID NO: 1762 - protein, 126 aa, synthetic construct
EVQLVESGGGVVQPGGSLRLSCAAPGDTFSENDIGWFRQTPGKEREFVAAIVWPGGETYYLDSVKGRFTLSRDNAKNTVYLQMNSLRPEDTALYSCAVKIFSKTGTYSASWEYDFWGQGTLVTVSS

SEQ ID NO: 1763 - protein, 126 aa, synthetic construct
EVQLVESGGGVVQPGGSLRLSCAAPGDTFSENDIGWFRQTPGKEREFVAAIVWPGGETYYFDSVKGRFTLSRDNAKNTVYLQMNSLRPEDTALYSCAVKIFSKTGTYSASWEYDFWGQGTLVTVSS

SEQ ID NO: 1764 - protein, 126 aa, synthetic construct
EVQLVESGGGVVQPGGSLRLSCAAPGDTFSENDIGWFRQTPGKEREFVAAIVWPGGTTYYRDSVKGRFTLSRDNAKNTVYLQMNSLRPEDTALYSCAVKIFSKTGTYSASWEYDFWGQGTLVTVSS

SEQ ID NO: 1765 - protein, 126 aa, synthetic construct
EVQLVESGGGVVQPGGSLRLSCAAPGDTFSENDIGWFRQTPGKEREFVAAIVWPGGESYYRDSVKGRFTLSRDNAKNTVYLQMNSLRPEDTALYSCAVKIFSKTGTYSASWEYDFWGQGTLVTVSS

SEQ ID NO: 1766 - protein, 126 aa, synthetic construct
EVQLVESGGGVVQPGGSLRLSCAAPGDTFSENDIGWFRQTPGKEREFVAAIVWPGGITYYRDSVKGRFTLSRDNAKNTVYLQMNSLRPEDTALYSCAVKIFSKTGTYSASWEYDFWGQGTLVTVSS

SEQ ID NO: 1767 - protein, 126 aa, synthetic construct
EVQLVESGGGVVQPGGSLRLSCAAPGDTFSENDIGWFRQTPGKEREFVAAIVWPGGRTYYRDSVKGRFTLSRDNAKNTVYLQMNSLRPEDTALYSCAVKIFSKTGTYSASWEYDFWGQGTLVTVSS

SEQ ID NO: 1768 - protein, 126 aa, synthetic construct
EVQLVESGGGVVQPGGSLRLSCAAPGDTFSENDIGWFRQTPGKEREFVAAIVWPGGHTYYRDSVKGRFTLSRDNAKNTVYLQMNSLRPEDTALYSCAVKIFSKTGTYSASWEYDFWGQGTLVTVSS

SEQ ID NO: 1769 - protein, 126 aa, synthetic construct
EVQLVESGGGVVQPGGSLRLSCAAPGDTFSENDIGWFRQTPGKEREFVAAIVWPGGQTYYRDSVKGRFTLSRDNAKNTVYLQMNSLRPEDTALYSCAVKIFSKTGTYSASWEYDFWGQGTLVTVSS

SEQ ID NO: 1770 - protein, 126 aa, synthetic construct
EVQLVESGGGVVQPGGSLRLSCAAPGDTFSENDIGWFRQTPGKEREFVAAIVWPGGDTYYRDSVKGRFTLSRDNAKNTVHLQMNSLRPEDTALYSCAVKIFSKTGTYSASWEYDFWGQGTLVTVSS

SEQ ID NO: 1771 - protein, 126 aa, synthetic construct
EVQLVESGGGVVQPGGSLRLSCAAPGDTFSENDIGWFRQTPGKEREFVAAIVWPGGKTYYRDSVKGRFTLSRDNAKNTVYLQMNSLRPEDTALYSCAVKIFSKTGTYSASWEYDFWGQGTLVTVSS

SEQ ID NO: 1772 - protein, 126 aa, synthetic construct
EVQLVESGGGVVQPGGSLRLSCAAPGDTFSENDIGWFRQTPGKEREFVAAIVWPGQETYYRDSVKGRFTLSRDNAKNTVYLQMNSLRPEDTALYSCAVKIFSKTGTYSASWEYDFWGQGTLVTVSS

SEQ ID NO: 1773 - protein, 126 aa, synthetic construct
EVQLVESGGGVVQPGGSLRLSCAAPGDTFSENDIGWFRQTPGKEREFVAAIVWPGHETYYRDSVKGRFTLSRDNAKNTVYLQMNSLRPEDTALYSCAVKIFSKTGTYSASWEYDFWGRGTLVTVSS

SEQ ID NO: 1774 - protein, 126 aa, synthetic construct
EVQLVESGGGVVQPGGSLRLSCAAPGDTFSENDIGWFRQTPGKEREFVAAIVWPGKETYYRDSVKGRFTLSRDNAKNTVYLQMNSLRPEDTALYSCAVKIFSKTGTYSASWEYDFWGQGTLVTVSS

SEQ ID NO: 1775 - protein, 126 aa, synthetic construct
EVQLVESGGGVVQPGGSLRLSCAAPGDTFSENDIGWFRQTPGKEREFVAAIVWPGIETYYRDSVKGRFTLSRDNAKNTVYLQMNSLRPEDTALYSCAVKIFSKTGTYSASWEYDFWGQGTLVTVSS

SEQ ID NO: 1776 - protein, 126 aa, synthetic construct
EVQLVESGGGVVQPGGSLRLSCAAPGDTFSENDIGWFRQTPGKEREFVAAIVWPGRETYYRDSVKGRFTLSRDNAKNTVYLQMNSLRPEDTALYSCAVKIFSKTGTYSASWEYDFWGQGTLVTVSS

SEQ ID NO: 1777 - protein, 126 aa, synthetic construct
EVQLVESGGGVVQPGGSLRLSCAAPGDTFSENDIGWFRQTPGKEREFVAAIVWPGDETYYRDSVKGRFTLSRDNAKNTVYLQMNSLRPEDTALYSCAVKIFSKTGTYSASWEYDFWGQGTLVTVSS

SEQ ID NO: 1778 - protein, 126 aa, synthetic construct
EVQLVESGGGVVQPGGSLRLSCAAPGDTFSENDIGWFRQTPGKEREFVAAIVWPGVETYYRDSVKGRFTLSRDNAKNTVYLQMNSLRPEDTALYSCAVKIFSKTGTYSASWEYDFWGQGTLVTVSS

SEQ ID NO: 1779 - protein, 126 aa, synthetic construct
EVQLVESGGGVVQPGGSLRLSCAAPGDTFSENDIGWFRQTPGKEREFVAAIVWPGSETYYRDSVKGRFTLSRDNAKNTVYLQMNSLRPEDTALYSCAVKIFSKTGTYSASWEYDFWGQGTLVTVSS

SEQ ID NO: 1780 - protein, 126 aa, synthetic construct
EVQLVESGGGVVQPGGSLRLSCAAPGDTFSENDIGWFRQTPGKEREFVAAIVWPGGETYYIDSVKGRFTLSRDNAKNTVYLQMNSLRPEDTALYSCAVKIFSKTGTYSASWEYDFWGQGTLVTVSS

SEQ ID NO: 1781 - protein, 126 aa, synthetic construct
EVQLVESGGGVVQPGGSLRLSCAAPGDTFSENDIGWFRQTPGKEREFVAAIVWPGGEDYYRDSVKGRFTLSRDNAKNTVYLQMNSLRPEDTALYSCAVKIFSKTGTYSASWEYDFWGQGTLVTVSS

SEQ ID NO: 1782 - protein, 126 aa, synthetic construct
EVQLVESGGGVVQPGGSLRLSCAAPGDTFSENDIGWFRQTPGKEREFVAAIVWPGGSTYYRDSVKGRFTLSRDNAKNTVYLQMNSLRPEDTALYSCAVKIFSKTGTYSASWEYDFWGQGTLVTVSS

SEQ ID NO: 1783 - protein, 126 aa, synthetic construct
EVQLVESGGGVVQPGGSLRLSCAAPGDTFSENDIGWFRQTPGKEREFVAAIVWPGGPTYYRDSVKGRFTLSRDNAKNTVYLQMNSLRPEDTALYSCAVKIFSKTGTYSASWEYDFWGQGTLVTVSS

SEQ ID NO: 1784 - protein, 126 aa, synthetic construct
EVQLVESGGGVVQPGGSLRLSCAAPGDTFSENDIGWFRQTPGKEREFVAAIVWPGGATYYRDSVKGRFTLSRDNAKNTVYLQMNSLRPEDTALYSCAVKIFSKTGTYSASWEYDFWGQGTLVTVSS

SEQ ID NO: 1785 - protein, 126 aa, synthetic construct
EVQLVESGGGVVQPGGSLRLSCAAPGDTFSENDIGWFRQTPGKEREFVAAIVWPGGEKYYRDSVKGRFTLSRDNAKNTVYLQMNSLRPEDTALYSCAVKIFSKTGTYSASWEYDFWGQGTLVTVSS

SEQ ID NO: 1786 - protein, 126 aa, synthetic construct
EVQLVESGGGVVQPGGSLRLSCAAPGDTFSENDIGWFRQTPGKEREFVAAIVWPGGELYYRDSVKGRFTLSRDNAKNTVYLQMNSLRPEDTALYSCAVKIFSKTGTYSASWEYDFWGQGTLVTVSS

SEQ ID NO: 1787 - protein, 126 aa, synthetic construct
EVQLVESGGGVVQPGGSLRLSCAAPGDTFSENDIGWFRQTPGKEREFVAAIVWPGGEAYYRDSVKGRFTLSRDNAKNTVYLQMNSLRPEDTALYSCAVKIFSKTGTYSASWEYDFWGQGTLVTVSS

SEQ ID NO: 1788 - protein, 126 aa, synthetic construct
EVQLVESGGGVVQPGGSLRLSCAAPGDTFSENDIGWFRQTPGKEREFVAAIVWPGGEVYYRDSVKGRFTLSRDNAKNTVYLQMNSLRPEDTALYSCAVKIFSKTGTYSASWEYDFWGQGTLVTVSS

SEQ ID NO: 1789 - protein, 126 aa, synthetic construct
EVQLVESGGGVVQPGGSLRLSCAAPGDTFSENDIGWFRQTPGKEREFVAAIVWPGGTTYYRDSVKGRFTLSRDNAKNTVYLQMNSLRPEDTALYPCAVKIFSKTGTYSASWEYDFWGQGTLVTVSS

SEQ ID NO: 1790 - protein, 126 aa, synthetic construct
EVQLVESGGGVVQPGGSLRLSCAAPGDTFSENDIGWFRQTPGKEREFVAAIVWPGGPTYYRDSVKGRFTLSRDNAKNTVYLQMNSLRPEDTALYSCAVKIFSKTGTYSASWEYDFWGQGTPVTVSS

SEQ ID NO: 1791 - protein, 126 aa, synthetic construct
EVQLVESGGGVVQPGGSLRLSCAAPGDTFSENDIGWFRQTPGKEREFVAAIVWPGGEHYYRDSVKGRFTLSRDNAKNTVYLQMNSLRPEDTALYSCAVKIFSKTGTYSASWEYDFWGQGTLVTVSS

SEQ ID NO: 1792 - protein, 126 aa, synthetic construct
EVQLVESGGGVVQPGGSLRLSCAAPGDTFSENDIGWFRQTPGKEREFVAAIVWPGGFTYYRDSVKGRFTLSRDNAKNTVYLQMNSLRPEDTALYSCAVKIFSKTGTYSASWEYDFWGQGTLVTVSS

SEQ ID NO: 1793 - protein, 126 aa, synthetic construct
EVQLVESGGGVVQPGGSLRLSCAAPGDTFSENDIGWFRQTPGKEREFVAAIVWPGGYTYYRDSVKGRFTLSRDNAKNTVYLQMNSLRPEDTALYSCAVKIFSKTGTYSASWEYDFWGQGTLVTVSS

SEQ ID NO: 1794 - protein, 126 aa, synthetic construct
EVQLVESGGGVVQPGGSLRLSCAAPGDTFSENDIGWFRQTPGKEREFVAAIVWPGGVTYYRDSVKGRFTLSRDNAKNTVYLQMNSLRPEDTALYSCAVKIFSKTGTYSASWEYDFWGQGTLVTVSS

SEQ ID NO: 1795 - protein, 126 aa, synthetic construct
EVQLVESGGGVVQPGGSLRLSCAAPGDTFSENDIGWFRQTPGKEREFVAAIVWPGGGTYYRDSVKGRFTLSRDNAKNTVYLQMNSLRPEDTALYSCAVKIFSKTGTYSASWEYDFWGQGTLVTVSS

SEQ ID NO: 1796 - protein, 126 aa, synthetic construct
EVQLVESGGGVVQPGGSLRLSCAAPGDTFSENDIGWFRQTPGKEREFVAAIVWPGGDTYYRDSVKGRFTLSRDNAKNTVYLQMNSLRPEDTALYSCAVKIFSKTGTYSASWEYDFWGQGTLVTVSS

SEQ ID NO: 1797 - protein, 126 aa, synthetic construct
EVQLVESGGGVVQPGGSLRLSCAAPGDTFSENDIGWFRQTPGKEREFVAAIVWPGGLTYYRDSVKGRFTLSRDNAKNTVYLQMNSLRPEDTALYSCAVKIFSKTGTYSASWEYDFWGQGTLVTVSS

SEQ ID NO: 1798 - protein, 126 aa, synthetic construct
EVQLVESGGGVVQPGGSLRLSCAAPGDTFSENDIGWFRQTPGKEREFVAAIVWPGGETYYEDSVKGRFTLSRDNAKNTVYLQMNSLRPEDTALYSCAVKIFSKTGTYSASWEYDFWGQGTLVTVSS

SEQ ID NO: 1799 - protein, 126 aa, synthetic construct
EVQLVESGGGVVQPGGSLRLSCAAPGDTFSENDIGWFRQTPGKEREFVAAIVWPGGETYYRDSVKGRFTLSRDVAKNTVYLQMNSLRPEDTALYSCAVKIFSKTGTYSASWEYDFWGQGTLVTVSS

SEQ ID NO: 1800 - protein, 126 aa, synthetic construct
EVQLVESGGGVVQPGGSLRLSCAAPGDTFSENDIGWFRQTPGKEREFVAAIVWPGGETYYRDSVKGRFTLSRDIAKNTVYLQMNSLRPEDTALYSCAVKIFSKTGTYSASWEYDFWGQGTLVTVSS

SEQ ID NO: 1801 - protein, 126 aa, synthetic construct
EVQLVESGGGVVQPGGSLRLSCAAPGDTFSENDIGWFRQTPGKEREFVAAIVWPGGETYYRDSVKGRFTLSRDNAKNTVYLQMNSLRPEDTALYSCYVKIFSKTGTYSASWEYDFWGQGTLVTVSS

SEQ ID NO: 1802 - protein, 126 aa, synthetic construct
EVQLVESGGGVVQPGGSLRLSCAAPGDTFSENDIGWFRQTPGKEREFVAAIVWPGGETYYRDSVKGRFTLSRDNAKNTVYLQMNSLRPEDTALYSCAKKIFSKTGTYSASWEYDFWGQGTLVTVSS

SEQ ID NO: 1803 - protein, 126 aa, synthetic construct
EVQLVESGGGVVQPGGSLRLSCAAPGDTFSENDIGWFRQTPGKEREFVAAIVWPGGETYYRDSVKGRFTLSRDNAKNTVYLQMNSLRPEDTALYSCDVKIFSKTGTYSASWEYDFWGQGTLVTVSS

SEQ ID NO: 1804 - protein, 126 aa, synthetic construct
EVQLVESGGGVVQPGGSLRLSCAAPGDTFSENDIGWFRQTPGKEREFVAAIVWPGGETYYRDSVKGRFTLSRDNAKNTVYLQMNSLRPEDTALYSCAYKIFSKTGTYSASWEYDFWGQGTLVTVSS

SEQ ID NO: 1805 - protein, 126 aa, synthetic construct
EVQLVESGGGVVQPGGSLRLSCAAPGDTFSENDIGWFRQTPGKEREFVAAIVWPGGETYYRDSVKGRFTLSRDNAKNTVYLQMNSLRPEDTALYSCAQKIFSKTGTYSASWEYDFWGQGTLVTVSS

SEQ ID NO: 1806 - protein, 126 aa, synthetic construct
EVQLVESGGGVVQPGGSLRLSCAAPGDTFSENDIGWFRQTPGKEREFVAAIVWPGGETYYRDSVKGRFTLSRDNAKNTVYLQMNSLRPEDTALYSCAEKIFSKTGTYSASWEYDFWGQGTLVTVSS

SEQ ID NO: 1807 - protein, 126 aa, synthetic construct
EVQLVESGGGVVQPGGSLRLSCAAPGDTFSENDIGWFRQTPGKEREFVAAIVWPGGETYYRDSVKGRFTLSRDNAKNTVYLQMNSLRPEDTALYSCAARIFSKTGTYSASWEYDFWGQGTLVTVSS

SEQ ID NO: 1808 - protein, 126 aa, synthetic construct
EVQLVESGGGVVQPGGSLRLSCAAPGDTFSENDIGWFRQTPGKEREFVAAIVWPGGETYYRDSVKGRFTLSRDNAKNTVYLQMNSLRPEDTALYSCATKIFSKTGTYSASWEYDFWGQGTLVTVSS

SEQ ID NO: 1809 - protein, 126 aa, synthetic construct
EVQLVESGGGVVQPGGSLRLSCAAPGDTFSENDIGWFRQTPGKEREFVAAIVWPGGETYYRDSVKGRFTLSRDNAKNTVYLQMNSLRPEDTALYSCARKIFSKTGTYSASWEYDFWGQGTLVTVSS

SEQ ID NO: 1810 - protein, 126 aa, synthetic construct
EVQLVESGGGVVQPGGSLRLSCAAPGDTFSENDIGWFRQTPGKEREFVAAIVWPGGETYYRDSVKGRFTLSRDNAKNTVYLQMNSLRPEDTALYSCAGKIFSKTGTYSASWEYDFWGQGTLVTVSS

SEQ ID NO: 1811 - protein, 126 aa, synthetic construct
EVQLVESGGGVVQPGGSLRLSCAAPGDTFSENDIGWFRQTPGKEREFVAAIVWPGGETYYRDSVKGRFTLSRDNAKNTVYLQMNSLRPEDTALYSCALKIFSKTGTYSASWEYDFWGQGTLVTVSS

SEQ ID NO: 1812 - protein, 126 aa, synthetic construct
EVQLVESGGGVVQPGGSLRLSCAAPGDTFSENDIGWFRQTPGKEREFVAAIVWPGGETYYRDSVKGRFTLSRDNAKNTVYLQMNSLRPEDTALYSCAIKIFSKTGTYSASWEYDFWGQGTLVTVSS

SEQ ID NO: 1813 - protein, 126 aa, synthetic construct
EVQLVESGGGVVQPGGSLRLSCAAPGDTFSENDIGWFRQTPGKEREFVAAIVWPGGETYYRDSVKGRFTLSRDNAKNTVYLQMNSLRPEDTALYSCASKIFSKTGTYSASWEYDFWGQGTLVTVSS

SEQ ID NO: 1814 - protein, 126 aa, synthetic construct
EVQLVESGGGVVQPGGSLRLSCAAPGDTFSENDIGWFRQTPGKEREFVAAIVWPGGETYYRDSVKGRFTLSRDNAKNTVYLQMNSLRPEDTALYSCRVKIFSKTGTYSASWEYDFWGQGTLVTVSS

SEQ ID NO: 1815 - protein, 126 aa, synthetic construct
EVQLVESGGGVVQPGGSLRLSCAAPGDTFSENDIGWFRQTPGKEREFVAAIVWPGGETYYRDSVKGRFTLSRDNAKNTVYLQMNSLRPEDTALYSCADKIFSKTGTYSASWEYDFWGQGTLVTVSS

SEQ ID NO: 1816 - protein, 126 aa, synthetic construct
EVQLVESGGGVVQPGGSLRLSCAAPGDTFSENDIGWFRQTPGKEREFVAAIVWPGGETYYRDSVKGRFTLSRDNAKNTVYLQMNSLRPEDTALYSCPVKIFSKTGTYSASWEYDFWGQGTLVTVSS

SEQ ID NO: 1817 - protein, 126 aa, synthetic construct
EVQLVESGGGVVQPGGSLRLSCAAPGDTFSENDIGWFRQTPGKEREFVAAIVWPGGETYYRDSVKGRFTLSRDNAKNTVYLQMNSLRPEDTALYSCAPKIFSKTGTYSASWEYDFWGQGTLVTVSS

SEQ ID NO: 1818 - protein, 126 aa, synthetic construct
EVQLVESGGGVVQPGGSLRLSCAAPGDTFSENDIGWFRQTPGKEREFVAAIVWPGGETYYRDSVKGRFTLSRDNAKNTVYLQMNSLRPEDTALYSCAVLIFSKTGTYSASWEYDFWGQGTLVTVSS

SEQ ID NO: 1819 - protein, 126 aa, synthetic construct
EVQLVESGGGVVQPGGSLRLSCAAPGDTFSENDIGWFRQTPGKEREFVALIVWPGGETYYRDSVKGRFTLSRDNAKNTVYLQMNSLRPEDTALYSCAVKIFSKTGTYSASWEYDFWGQGTLVTVSS

SEQ ID NO: 1820 - protein, 126 aa, synthetic construct
EVQLVESGGGVVQPGGSLRLSCAAPGDTFSENDIGWFRQTPGKEREFVAAIVWPGGETYYRDSVKGRFTLSRDNAKNTVYLQMNSLRPEDTALYSCAVYIFSKTGTYSASWEYDFWGQGTLVTVSS

SEQ ID NO: 1821 - protein, 126 aa, synthetic construct
EVQLVESGGGVVQPGGSLRLSCAAPGDTFSENDIGWFRQTPGKEREFVAAIVWPGGETYYRDSVKGRFTLSRDNAKNTVYLQMNSLRPEDTALYSCAVTIFSKTGTYSASWEYDFWGQGTLVTVSS

SEQ ID NO: 1822 - protein, 126 aa, synthetic construct
EVQLVESGGGVVQPGGSLRLSCAAPGDTFSENDIGWFRQTPGKEREFVAAIVWPGGETYYRDSVKGRFTLSRDNAKNTVYLQMNSLRPEDTALYSCAVIIFSKTGTYSASWEYDFWGQGTLVTVSS

SEQ ID NO: 1823 - protein, 126 aa, synthetic construct
EVQLVESGGGVVQPGGSLRLSCAAPGDTFSENDIGWFRQTPGKEREFVAAIVWPGGETYYRDSVKGRFTLSRDNAKNTVYLQMNSLRPEDTALYSCAVQIFSKTGTYSASWEYDFWGQGTLVTVSS

SEQ ID NO: 1824 - protein, 126 aa, synthetic construct
EVQLVESGGGVVQPGGSLRLSCAAPGDTFSENDIGWFRQTPGKEREFVAAIVWPGGETYYRDSVKGRFTLSRDNAKNTVYLQMNSLRPEDTALYSCAVAIFSKTGTYSASWEYDFWGQGTLVTVSS

SEQ ID NO: 1825 - protein, 126 aa, synthetic construct
EVQLVESGGGVVQPGGSLRLSCAAPGDTFSENDIGWFRQTPGKEREFVAAIVWPGGETYYRDSVKGRFTLSRDNAKNTVYLQMNSLRPEDTALYSCAAKIFSKTGTYSASWEYDFWGQGTLVTVSS

SEQ ID NO: 1826 - protein, 126 aa, synthetic construct
EVQLVESGGGVVQPGGSLRLSCAAPGDTFSENDIGWFRQTPGKEREFVAAIVWPGGETYYRDSVKGRFTLSRDNAKNTVYLQMNSLRPEDTALYSCAVFIFSKTGTYSASWEYDFWGQGTLVTVSS

SEQ ID NO: 1827 - protein, 126 aa, synthetic construct
EVQLVESGGGVVQPGGSLRLSCAAPGDTFSENDIGWFRQTPGKEREFVAAIVWPGGETYYRDSVKGRFTLSRDNAKNTVYLQMNSLRPEDTALYSCAVPIFSKTGTYSASWEYDFWGQGTLVTVSS

SEQ ID NO: 1828 - protein, 126 aa, synthetic construct
EVQLVESGGGVVQPGGSLRLSCAAPGDTFSENDIGWFRQTPGKEREFVAAIVWPGGETYYRDSVKGRFTLSRDNAKNTVYLQMNSLRPEDTALYSCAVDIFSKTGTYSASWEYDFWGQGTLVTVSS

SEQ ID NO: 1829 - protein, 126 aa, synthetic construct
EVQLVESGGGVVQPGGSLRLSCAAPGDTFSENDIGWFRQTPGKEREFVAAIVWPGGETYYRDSVKGRFTLSRDNAKNTVYLQMNSLRPEDTALYSCAVHIFSKTGTYSASWEYDFWGQGTLVTVSS

SEQ ID NO: 1830 - protein, 126 aa, synthetic construct
EVQLVESGGGVVQPGGSLRLSCAAPGDTFSENDIGWFRQTPGKEREFVAAIVWPGGETYYRDSVKGRFTLSRDNAKNTVYLQMNSLRPEDTALYSCAVRIFSKTGTYSASWEYDFWGQGTLVTVSS

SEQ ID NO: 1831 - protein, 126 aa, synthetic construct
EVQLVESGGGVVQPGGSLRLSCAAPGDTFSENDIGWFRQTPGKEREFVAAIVWPGGETYYRDSVKGRFTLSRDNAKNTVYLQMNSLRPEDTALYSCAVVIFSKTGTYSASWEYDFWGQGTLVTVSS

SEQ ID NO: 1832 - protein, 126 aa, synthetic construct
EVQLVESGGGVVQPGGSLRLSCAAPGDTFSENDIGWFRQTPGKEREFVAAIVWPGGETYYRDSVKGRFTLSRDNAKNTVYLQMNSLRPEDTALYSCAVSIFSKTGTYSASWEYDFWGQGTLVTVSS

SEQ ID NO: 1833 - protein, 126 aa, synthetic construct
EVQLVESGGGVVQPGGSLRLSCAAPGDTFSENDIGWFRQTPGKEREFVAAIVWPGGETYYRDSVKGRFTLSRDNAKNTVYLQMNSLRPEDTALYSCAVEIFSKTGTYSASWEYDFWGQGTLVTVSS

SEQ ID NO: 1834 - protein, 126 aa, synthetic construct
EVQLVESGGGVVQPGGSLRLSCAAPGDTFSENDIGWFRQTPGKEREFVAAIVWPGGETYYRDSVKGRFTLSRDNAKNTVYLQMNSLRPEDTALYSCTVKIFSKTGTYSASWEYDFWGQGTLVTVSS

SEQ ID NO: 1835 - protein, 126 aa, synthetic construct
EVQLVESGGGVVQPGGSLRLSCAAPGDTFSENDIGWFRQTPGKEREFVAAIVWPGGETYYRDSVKGRFTLSRDNAKNTVYLQMNSLRPEDTALYSCKVKIFSKTGTYSASWEYDFWGQGTLVTVSS

SEQ ID NO: 1836 - protein, 126 aa, synthetic construct
EVQLVESGGGVVQPGGSLRLSCAAPGDTFSENDIGWFRQTPGKEREFVAAIVWPGGETYYRDSMKGRFTLSRDNAKNTVYLQMNSLRPEDTALYSCQVKIFSKTGTYSASWEYDFWGQGTLVTVSS

SEQ ID NO: 1837 - protein, 126 aa, synthetic construct
EVQLVESGGGVVQPGGSLRLSCAAPGDTFSENDIGWFRQTPGKEREFVAAIVWPGGETYYRDSVKGRFTLSRDTAKNTVYLQMNSLRPEDTALYSCAVKIFSKTGTYSASWEYDFWGQGTLVTVSS

SEQ ID NO: 1838 - protein, 126 aa, synthetic construct
EVQLVESGGGVVQPGGSLRLSCAAPGDTFSENDIGWFRQTPGKEREFVAAIVWPGGETYYRDSVKGRFTLSRDKAKNTVYLQMNSLRPEDTALYSCAVKIFSKTGTYSASWEYDFWGQGTLVTVSS

SEQ ID NO: 1839 - protein, 126 aa, synthetic construct
EVQLVESGGGVVQPGGSLRLSCAAPGDTFSENDIGWFRQTPGKEREFVAAIVWPGGETYYRDSVKGRFTLSRDGAKNTVYLQMNSLRPEDTALYSCAVKIFSKTGTYSASWEYDFWGQGTLVTVSS

SEQ ID NO: 1840 - protein, 126 aa, synthetic construct
EVQLVESGGGVVQPGGSLRLSCAAPGDTFSENDIGWFRQTPGKEREFVAAIVWPGGETYYRDSVKGRFTLSRDAAKNTVYLQMNSLRPEDTALYSCAVKIFSKTGTYSASWEYDFWGQGTLVTVSS

SEQ ID NO: 1841 - protein, 126 aa, synthetic construct
EVQLVESGGGVVQPGGSLRLSCAAPGDTFSENDIGWFRQTPGKEREFVAAIVWPGGETYYRDSVKGRFTLSRDQAKNTVYLQMNSLRPEDTALYSCAVKIFSKTGTYSASWEYDFWGQGTLVTVSS

SEQ ID NO: 1842 - protein, 126 aa, synthetic construct
EVQLVESGGGVVQPGGSLRLSCAAPGDTFSENDIGWFRQTPGKEREFVAAIVWPGGETYYRDSVKGRFTLSRDHAKNTVYLQMNSLRPEDTALYSCAVKIFSKTGTYSASWEYDFWGQGTLVTVSS

SEQ ID NO: 1843 - protein, 126 aa, synthetic construct
EVQLVESGGGVVQPGGSLRLSCAAPGDTFSENDIGWFRQTPGKEREFVAAIVWPGGETYYRDSVKGRFTLSRDPAKNTVYLQMNSLRPEDTALYSCAVKIFSKTGTYSASWEYDFWGQGTLVTVSS

SEQ ID NO: 1844 - protein, 126 aa, synthetic construct
EVQLVESGGGVVQPGGSLRLSCAAPGDTFSENDIGWFRQTPGKEREFVAAIVWPGGETYYRDSVKGRFTLSRDQAKNTVYLQMNSLRPEDTALYSCAVKIFSKTGTYSASWEYDFWGQGTPVTVSS

SEQ ID NO: 1845 - protein, 126 aa, synthetic construct
EVQLVESGGGVVQPGGSLRLSCAAPGDTFSENDIGWFRQTPGKEREFVAAIVWPGGETYYRDSVKGRFTLSRDNAKNTVYLQMNSLRPEDTALYHCAVKIFSKTGTYSASWEYDFWGQGTLVTVSS

SEQ ID NO: 1846 - protein, 126 aa, synthetic construct
EVQLVESGGGVVQPGGSLRLSCAAPGDTFSENDIGWFRQTPGKEREFVAAIVWPGGETYYRDSVKGRFTLSRDRAKNTVYLQMNSLRPEDTALYSCAVKIFSKTGTYSASWEYDFWGQGTLVTVSS

SEQ ID NO: 1847 - protein, 126 aa, synthetic construct
EVQLVESGGGVVQPGGSLRLSCAAPGDTFSENDIGWFRQTPGKEREFVAAIVWPGGETYYRDSVKGRFTLSRDLAKNTVYLQMNSLRPEDTALYSCAVKIFSKTGTYSASWEYDFWGQGTLVTVSS

SEQ ID NO: 1848 - protein, 126 aa, synthetic construct
EVQLVESGGGVVQPGGSLRLSCAAPGDTFSENDIGWFRQTPGKEREFVAAIVWPGGETYYRDSVKGRFTLSRDSAKNTVYLQMNSLRPEDTALYSCAVKIFSKTGTYSASWEYDFWGQGTLVTVSS

SEQ ID NO: 1849 - protein, 126 aa, synthetic construct
EVQLVESGGGVVQPGGSLRLSCAAPGDTFSENDIGWFRQTPGKEREFVAAIVWPGGETYYRDSVKGRFTLSRDYAKNTVYLQMNSLRPEDTALYSCAVKIFSKTGTYSASWEYDFWGQGTLVTVSS

SEQ ID NO: 1850 - protein, 126 aa, synthetic construct
EVQLVESGGGVVQPGGSLRLSCAAPGDTFSENDIGWFRQTPGKEREFVAAIVWPGGETYYRDSVKGRFTLSRDEAKNTVYLQMNSLRPEDTALYSCAVKIFSKTGTYSASWEYDFWGQGTLVTVSS

SEQ ID NO: 1851 - protein, 126 aa, synthetic construct
EVQLVESGGGVVQPGGSLRLSCAAPGDTFSENDIGWFRQTPGKEREFVAAIVWPGGETYYRDSVKGRFTLSRDNAKNTVYLQMNSLRPEDTALYKCAVKIFSKTGTYSASWEYDFWGQGTLVTVSS

SEQ ID NO: 1852 - protein, 126 aa, synthetic construct
EVQLVESGGGVVQPGGSLRLSCAAPGDTFSENDIGWFRQTPGKEREFVAAIVWPGGETYYRDSVKGRFTLSRDNAKNTVYLQMNSLRPEDTALYSCGVKIFSKTGTYSASWEYDFWGQGTLVTVSS

SEQ ID NO: 1853 - protein, 126 aa, synthetic construct
EVQLVESGGGVVQPGGSLRLSCAAPGDTFSENDIGWFRQTPGKEREFVAAIVWPGGETYYRDSVKGRFTLSRDNAKNTVYLQMNSLRPEDTALYSCEVKIFSKTGTYSASWEYDFWGQGTLVTVSS

SEQ ID NO: 1854 - protein, 126 aa, synthetic construct
EVQLVESGGGVVQPGGSLRLSCAAPGDTFSENDIGWFRQTPGKEREFVAAIVWPGGETYYRDSVKGRFTLSRDNAKNTVYLQMNSLRPEDTALYECAVKIFSKTGTYSASWEYDFWGQGTLVTVSS

SEQ ID NO: 1855 - protein, 126 aa, synthetic construct
EVQLVESGGGVVQPGGSLRLSCAAPGDTFSENDIGWFRQTPGKEREFVAAIVWPGGETYYRDSVKGRFTLSRDNAKNTVYLQMNSLRPEDTALYSCLVKIFSKTGTYSASWEYDFWGQGTLVTVSS

SEQ ID NO: 1856 - protein, 126 aa, synthetic construct
EVQLVESGGGVVQPGGSLRLSCAAPGDTFSENDIGWFRQTPGKEREFVAAIVWPGGETYYRDSVKGRFTLSRDNAKNTVYLQMNSLRPEDTALYGCAVKIFSKTGTYSASWEYDFWGQGTLVTVSS

SEQ ID NO: 1857 - protein, 126 aa, synthetic construct
EVQLVESGGGVVQPGGSLRLSCAAPGDTFSENDIGWFRQTPGKEREFVAAIVWPGGETYYRDSVKGRFTLSRDNAKNTVYLQMNSLRPEDTALYTCAVKIFSKTGTYSASWEYDFWGQGTLVTVSS

SEQ ID NO: 1858 - protein, 126 aa, synthetic construct
EVQLVESGGGVVQPGGSLRLSCAAPGDTFSENDIGWFRQTPGKEREFVAAIVWPGGETYYRDSVKGRFTLSRDNAKNTVYLQMNSLRPEDTALYSCFVKIFSKTGTYSASWEYDFWGQGTLVTVSS

SEQ ID NO: 1859 - protein, 126 aa, synthetic construct
EVQLVESGGGVVQPGGSLRLSCAAPGDTFSENDIGWFRQTPGKEREFVAAIVWPGGETYYRDSVKGRFTLSRDNAKNTVYLQMNSLRPEDTALYSCQVKIFSKTGTYSASWEYDFWGQGTLVTVSS

SEQ ID NO: 1860 - protein, 126 aa, synthetic construct
EVQLVESGGGVVQPGGSLRLSCAAPGDTFSENDIGWFRQTPGKEREFVAAIVWPGGETYYRDSVKGRFTLSRDNAKNTVYLQMNSLRPEDTALYSCVVKIFSKTGTYSASWEYDFWGQGTLVTVSS

SEQ ID NO: 1861 - protein, 126 aa, synthetic construct
EVQLVESGGGVVQPGGSLRLSCAAPGDTFSENDIGWFRQTPGKEREFVAAIVWPGGETYYRDSVKGRFTLSRDNAKNTVYLQMNSLRPEDTALYSCIVKIFSKTGTYSASWEYDFWGQGTLVTVSS

SEQ ID NO: 1862 - protein, 126 aa, synthetic construct
EVQLVESGGGVVQPGGSLRLSCAAPGDTFSENDIGWFRQTPGKEREFVAAIVWPGGETYYRDSVKGRFTLSRDNAKNTVYLQMNSLRPEDTALYSCHVKIFSKTGTYSASWEYDFWGQGTLVTVSS

SEQ ID NO: 1863 - protein, 126 aa, synthetic construct
EVQLVESGGGVVQPGGSLRLSCAAPGDTFSENDIGWFRQTPGKEREFVAAIVWPGGETYYRDSVKGRFTLSRDNAKNTVYLQMNSLRPEDTALYVCAVKIFSKTGTYSASWEYDFWGQGTLVTVSS

SEQ ID NO: 1864 - protein, 126 aa, synthetic construct
EVQLVESGGGVVQPGGSLRLSCAAPGDTFSENDIGWFRQTPGKEREFVAAIVWPGGETYYRDSVKGRFTLSRDNAKNTVYLQMNSLRPEDTALYQCAVKIFSKTGTYSASWEYDFWGQGTLVTVSS

SEQ ID NO: 1865 - protein, 126 aa, synthetic construct
EVQLVESGGGVVQPGGSLRLSCAAPGDTFSENDIGWFRQTPGKEREFVAAIVWPGGETYYRDSVKGRFTLSRDNAKNTVYLQMNSLRPEDTALYRCAVKIFSKTGTYSASWEYDFWGQGTLVTVSS

SEQ ID NO: 1866 - protein, 126 aa, synthetic construct
EVQLVESGGGVVQPGGSLRLSCAAPGDTFSENDIGWFRQTPGKEREFVAAIVWPGGETYYRDSVKGRFTLSRDNAKNTVYLQMNSLRPEDTALYPCAVKIFSKTGTYSASWEYDFWGQGTLVTVSS

SEQ ID NO: 1867 - protein, 126 aa, synthetic construct
EVQLVESGGGVVQPGGSLRLSCAAPGDTFSENDIGWFRQTPGKEREFVAAIVWPGGETYYRDSVKGRFTLSRDNAKNTVYLQMNSLRPEDTALYDCAVKIFSKTGTYSASWEYDFWGQGTLVTVSS

SEQ ID NO: 1868 - protein, 126 aa, synthetic construct
EVQLVESGGGVVQPGGSLRLSCAAPGDTFSENDIGWFRQTPGKEREFVAAIVWPGGETYYRDSVKGRFTLSRDNAKNTVYLQMNSLRPEDTALYFCAVKIFSKTGTYSASWEYDFWGQGTLVTVSS

SEQ ID NO: 1869 - protein, 126 aa, synthetic construct
EVQLVESGGGVVQPGGSLRLSCAAPGDTFSENDIGWFRQTPGKEREFVAAIVWPGGETYYRDSVKGRFTLSRDNAKNTVYLQMNSLRPEDTALYICAVKIFSKTGTYSASWEYDFWGQGTLVTVSS

SEQ ID NO: 1870 - protein, 126 aa, synthetic construct
EVQLVESGGGVVQPGGSLRLSCAAPGDTFSENDIGWFRQTPGKEREFVAAIVWPGGETYYRDSVKGRFTLSRDNAKNTVYLQMNSLRPEDTALYSCAVKPFSKTGTYSASWEYDFWGQGTLVTVSS

SEQ ID NO: 1871 - protein, 126 aa, synthetic construct
EVQLVESGGGVVQPGGSLRLSCAAPGDTFSENDIGWFRQAPGKEREFVAAIFWPGGETYYRDKVKGRFTLSRDVAKNTVYLQMNSLRAEDTALYYCAVKIFSKTGTYSASWEYDFWGQGTLVTVSS

SEQ ID NO: 1872 - protein, 25 aa, synthetic construct
DVQLVESGGGVVQPGGSLRLSCAAP

SEQ ID NO: 1873 - protein, 25 aa, synthetic construct
EVQLAESGGGVVQPGGSLRLSCAAP

SEQ ID NO: 1874 - protein, 25 aa, synthetic construct
EVQLVESGEGVVQPGGSLRLSCAAP

SEQ ID NO: 1875 - protein, 25 aa, synthetic construct
EVQLVESGGGAVQPGGSLRLSCAAP

SEQ ID NO: 1876 - protein, 25 aa, synthetic construct
EVQLVESGGGLVQLGGSLRLSCAAP

SEQ ID NO: 1877 - protein, 25 aa, synthetic construct
EVQLVESGGGVVQLGGSLRLSCAAP

SEQ ID NO: 1878 - protein, 25 aa, synthetic construct
EVQLVESGGGVVQPGGSLRISCAAP

SEQ ID NO: 1879 - protein, 25 aa, synthetic construct
EVQLVESGGGVVQPGGSLRLSCAAA

SEQ ID NO: 1880 - protein, 25 aa, synthetic construct
EVQLVESGGGVVQPGGSLRLSCAAD

SEQ ID NO: 1881 - protein, 25 aa, synthetic construct
EVQLVESGGGVVQPGGSLRLSCAAE

SEQ ID NO: 1882 - protein, 25 aa, synthetic construct
EVQLVESGGGVVQPGGSLRLSCAAF

SEQ ID NO: 1883 - protein, 25 aa, synthetic construct
EVQLVESGGGVVQPGGSLRLSCAAG

SEQ ID NO: 1884 - protein, 25 aa, synthetic construct
EVQLVESGGGVVQPGGSLRLSCAAH

SEQ ID NO: 1885 - protein, 25 aa, synthetic construct
EVQLVESGGGVVQPGGSLRLSCAAI

SEQ ID NO: 1886 - protein, 25 aa, synthetic construct
EVQLVESGGGVVQPGGSLRLSCAAK

SEQ ID NO: 1887 - protein, 25 aa, synthetic construct
EVQLVESGGGVVQPGGSLRLSCAAL

SEQ ID NO: 1888 - protein, 25 aa, synthetic construct
EVQLVESGGGVVQPGGSLRLSCAAP

SEQ ID NO: 1889 - protein, 25 aa, synthetic construct
EVQLVESGGGVVQPGGSLRLSCAAQ

SEQ ID NO: 1890 - protein, 17 aa, synthetic construct
KIFSKTGTYSASWEHDF

SEQ ID NO: 1891 - protein, 17 aa, synthetic construct
KIFSKTGTASASWEYDF

SEQ ID NO: 1892 - protein, 17 aa, synthetic construct
KIFSKTGIYSASWEYDF

SEQ ID NO: 1893 - protein, 17 aa, synthetic construct
KIFPKTGTYSASWEYDF

SEQ ID NO: 1894-1897 - skipped (4 entries)

SEQ ID NO: 1898 - protein, 11 aa, synthetic construct
SSQGTLVTVSS

SEQ ID NO: 1899 - skipped

SEQ ID NO: 1900 - protein, 25 aa, synthetic construct
EVQLVESGGGVVQPGGSLRLSCAAR

SEQ ID NO: 1901 - protein, 25 aa, synthetic construct
EVQLVESGGGVVQPGGSLRLSCAAS

SEQ ID NO: 1902 - protein, 25 aa, synthetic construct
EVQLVESGGGVVQPGGSLRLSCAAT

SEQ ID NO: 1903 - protein, 25 aa, synthetic construct
EVQLVESGGGVVQPGGSLRLSCAAV

SEQ ID NO: 1904 - protein, 25 aa, synthetic construct
EVQLVESVGGVVQPGGSLRLSCAAP

SEQ ID NO: 1905 - protein, 10 aa, synthetic construct
ADTFSENDIG

SEQ ID NO: 1906 - protein, 10 aa, synthetic construct
DDTFSENDIG

SEQ ID NO: 1907 - protein, 10 aa, synthetic construct
EDTFSENDIG

SEQ ID NO: 1908 - protein, 10 aa, synthetic construct
FDTFSENDIG

SEQ ID NO: 1909 - protein, 10 aa, synthetic construct
GATFSENDIG

SEQ ID NO: 1910 - protein, 10 aa, synthetic construct
GDAFSENDIG

SEQ ID NO: 1911 - protein, 10 aa, synthetic construct
GDEFSENDIG

SEQ ID NO: 1912 - protein, 10 aa, synthetic construct
GDFFSENDIG

SEQ ID NO: 1913 - protein, 10 aa, synthetic construct
GDGFSENDIG

SEQ ID NO: 1914 - protein, 10 aa, synthetic construct
GDHFSENDIG

SEQ ID NO: 1915 - protein, 10 aa, synthetic construct
GDIFSENDIG

SEQ ID NO: 1916 - protein, 10 aa, synthetic construct
GDKFSENDIG

SEQ ID NO: 1917 - protein, 10 aa, synthetic construct
GDLFSENDIG

SEQ ID NO: 1918 - protein, 10 aa, synthetic construct
GDPFSENDIG

SEQ ID NO: 1919 - protein, 10 aa, synthetic construct
GDQFSENDIG

SEQ ID NO: 1920 - protein, 10 aa, synthetic construct
GDRFSENDIG

SEQ ID NO: 1921 - protein, 10 aa, synthetic construct
GDSFSENDIG

SEQ ID NO: 1922 - protein, 10 aa, synthetic construct
GDTASENDIG

SEQ ID NO: 1923 - protein, 10 aa, synthetic construct
GDTDSENDIG

SEQ ID NO: 1924 - protein, 10 aa, synthetic construct
GDTESENDIG

SEQ ID NO: 1925 - protein, 10 aa, synthetic construct
GDTFAENDIG

SEQ ID NO: 1926 - protein, 10 aa, synthetic construct
GDTFDENDIG

SEQ ID NO: 1927 - protein, 10 aa, synthetic construct
GDTFEENDIG

SEQ ID NO: 1928 - protein, 10 aa, synthetic construct
GDTFFENDIG

SEQ ID NO: 1929 - protein, 10 aa, synthetic construct
GDTFGENDIG

SEQ ID NO: 1930 - protein, 10 aa, synthetic construct
GDTFHENDIG

SEQ ID NO: 1931 - protein, 10 aa, synthetic construct
GDTFIENDIG

SEQ ID NO: 1932 - protein, 10 aa, synthetic construct
GDTFIENIIG

SEQ ID NO: 1933 - protein, 10 aa, synthetic construct
GDTFKENDIG

SEQ ID NO: 1934 - protein, 10 aa, synthetic construct
GDTFLENDIG

SEQ ID NO: 1935 - protein, 10 aa, synthetic construct
GDTFQENDIG

SEQ ID NO: 1936 - protein, 10 aa, synthetic construct
GDTFRENDIG

SEQ ID NO: 1937 - protein, 10 aa, synthetic construct
GDTFSANDIG

SEQ ID NO: 1938 - protein, 10 aa, synthetic construct
GDTFSEADIG

SEQ ID NO: 1939 - protein, 10 aa, synthetic construct
GDTFSEDDIG

SEQ ID NO: 1940 - protein, 10 aa, synthetic construct
GDTFSEEDIG

SEQ ID NO: 1941 - protein, 10 aa, synthetic construct
GDTFSEFDIG

SEQ ID NO: 1942 - protein, 10 aa, synthetic construct
GDTFSEGDIG

SEQ ID NO: 1943 - protein, 10 aa, synthetic construct
GDTFSEHDIG

SEQ ID NO: 1944 - protein, 10 aa, synthetic construct
GDTFSEIDIG

SEQ ID NO: 1945 - protein, 10 aa, synthetic construct
GDTFSEKDIG

SEQ ID NO: 1946 - protein, 10 aa, synthetic construct
GDTFSELDIG

SEQ ID NO: 1947 - protein, 10 aa, synthetic construct
GDTFSENAIG

SEQ ID NO: 1948 - protein, 10 aa, synthetic construct
GDTFSENDAG

SEQ ID NO: 1949 - protein, 10 aa, synthetic construct
GDTFSENDDG

SEQ ID NO: 1950 - protein, 10 aa, synthetic construct
GDTFSENDEG

SEQ ID NO: 1951 - protein, 10 aa, synthetic construct
GDTFSENDFG

SEQ ID NO: 1952 - protein, 10 aa, synthetic construct
GDTFSENDGG

SEQ ID NO: 1953 - protein, 10 aa, synthetic construct
GDTFSENDHG

SEQ ID NO: 1954 - protein, 10 aa, synthetic construct
GDTFSENDIA

SEQ ID NO: 1955 - protein, 10 aa, synthetic construct
GDTFSENDID

SEQ ID NO: 1956 - protein, 10 aa, synthetic construct
GDTFSENDIE

SEQ ID NO: 1957 - protein, 10 aa, synthetic construct
GDTFSENDIG

SEQ ID NO: 1958 - protein, 10 aa, synthetic construct
GDTFSENDIH

SEQ ID NO: 1959 - protein, 10 aa, synthetic construct
GDTFSENDII

SEQ ID NO: 1960 - protein, 10 aa, synthetic construct
GDTFSENDIK

SEQ ID NO: 1961 - protein, 10 aa, synthetic construct
GDTFSENDIL

SEQ ID NO: 1962 - protein, 10 aa, synthetic construct
GDTFSENDIP

SEQ ID NO: 1963 - protein, 10 aa, synthetic construct
GDTFSENDIQ

SEQ ID NO: 1964 - protein, 10 aa, synthetic construct
GDTFSENDIR

SEQ ID NO: 1965 - protein, 10 aa, synthetic construct
GDTFSENDIS

SEQ ID NO: 1966 - protein, 10 aa, synthetic construct
GDTFSENDIT

SEQ ID NO: 1967 - protein, 10 aa, synthetic construct
GDTFSENDIV

SEQ ID NO: 1968 - protein, 10 aa, synthetic construct
GDTFSENDIY

SEQ ID NO: 1969 - protein, 10 aa, synthetic construct
GDTFSENDKG

SEQ ID NO: 1970 - protein, 10 aa, synthetic construct
GDTFSENDMG

SEQ ID NO: 1971 - protein, 10 aa, synthetic construct
GDTFSENDPG

SEQ ID NO: 1972 - protein, 10 aa, synthetic construct
GDTFSENDQG

SEQ ID NO: 1973 - protein, 10 aa, synthetic construct
GDTFSENDRG

SEQ ID NO: 1974 - protein, 10 aa, synthetic construct
GDTFSENDSG

SEQ ID NO: 1975 - protein, 10 aa, synthetic construct
GDTFSENDTG

SEQ ID NO: 1976 - protein, 10 aa, synthetic construct
GDTFSENDYG

SEQ ID NO: 1977 - protein, 10 aa, synthetic construct
GDTFSENEIG

SEQ ID NO: 1978 - protein, 10 aa, synthetic construct
GDTFSENFIG

SEQ ID NO: 1979 - protein, 10 aa, synthetic construct
GDTFSENGIG

SEQ ID NO: 1980 - protein, 10 aa, synthetic construct
GDTFSENHIG

SEQ ID NO: 1981 - protein, 10 aa, synthetic construct
GDTFSENIIG

SEQ ID NO: 1982 - protein, 10 aa, synthetic construct
GDTFSENKIG

SEQ ID NO: 1983 - protein, 10 aa, synthetic construct
GDTFSENLIG

SEQ ID NO: 1984 - protein, 10 aa, synthetic construct
GDTFSENPIG

SEQ ID NO: 1985 - protein, 10 aa, synthetic construct
GDTFSENRIG

SEQ ID NO: 1986 - protein, 10 aa, synthetic construct
GDTFSENSIG

SEQ ID NO: 1987 - protein, 10 aa, synthetic construct
GDTFSENTIG

SEQ ID NO: 1988 - protein, 10 aa, synthetic construct
GDTFSENVIG

SEQ ID NO: 1989 - protein, 10 aa, synthetic construct
GDTFSENYIG

SEQ ID NO: 1990 - protein, 10 aa, synthetic construct
GDTFSEPDIG

SEQ ID NO: 1991 - protein, 10 aa, synthetic construct
GDTFSEQDIG

SEQ ID NO: 1992 - protein, 10 aa, synthetic construct
GDTFSERDIG

SEQ ID NO: 1993 - protein, 10 aa, synthetic construct
GDTFSESDIG

SEQ ID NO: 1994 - protein, 10 aa, synthetic construct
GDTFSEVDIG

SEQ ID NO: 1995 - protein, 10 aa, synthetic construct
GDTFSEYDIG

SEQ ID NO: 1996 - protein, 10 aa, synthetic construct
GDTFSFNDIG

SEQ ID NO: 1997 - protein, 10 aa, synthetic construct
GDTFSGNDIG

SEQ ID NO: 1998 - protein, 10 aa, synthetic construct
GDTFSHNDIG

SEQ ID NO: 1999 - protein, 10 aa, synthetic construct
GDTFSINDIG

SEQ ID NO: 2000 - protein, 10 aa, synthetic construct
GDTFSKNDIG

SEQ ID NO: 2001 - protein, 10 aa, synthetic construct
GDTFSLNDIG

SEQ ID NO: 2002 - protein, 10 aa, synthetic construct
GDTFSPNDIG

SEQ ID NO: 2003 - protein, 10 aa, synthetic construct
GDTFSQNDIG

SEQ ID NO: 2004 - protein, 10 aa, synthetic construct
GDTFSRNDIG

SEQ ID NO: 2005 - protein, 10 aa, synthetic construct
GDTFSSNDIG

SEQ ID NO: 2006 - protein, 10 aa, synthetic construct
GDTFSTNDIG

SEQ ID NO: 2007 - protein, 10 aa, synthetic construct
GDTFSVNDIG

SEQ ID NO: 2008 - protein, 10 aa, synthetic construct
GDTFTENDIG

SEQ ID NO: 2009 - protein, 10 aa, synthetic construct
GDTFYENDIG

SEQ ID NO: 2010 - protein, 10 aa, synthetic construct
GDTGSENDIG

SEQ ID NO: 2011 - protein, 10 aa, synthetic construct
GDTHSENDIG

SEQ ID NO: 2012 - protein, 10 aa, synthetic construct
GDTISENDIG

SEQ ID NO: 2013 - protein, 10 aa, synthetic construct
GDTKSENDIG

SEQ ID NO: 2014 - protein, 10 aa, synthetic construct
GDTLSENDIG

SEQ ID NO: 2015 - protein, 10 aa, synthetic construct
GDTQSENDIG

SEQ ID NO: 2016 - protein, 10 aa, synthetic construct
GDTRSENDIG

SEQ ID NO: 2017 - protein, 10 aa, synthetic construct
GDTSSENDIG

SEQ ID NO: 2018 - protein, 10 aa, synthetic construct
GDTTSENDIG

SEQ ID NO: 2019 - protein, 10 aa, synthetic construct
GDTVSENDIG

SEQ ID NO: 2020 - protein, 10 aa, synthetic construct
GDTYSENDIG

SEQ ID NO: 2021 - protein, 10 aa, synthetic construct
GDVFSENDIG

SEQ ID NO: 2022 - protein, 10 aa, synthetic construct
GDYFSENDIG

SEQ ID NO: 2023 - protein, 10 aa, synthetic construct
GETFSENDIG

SEQ ID NO: 2024 - protein, 10 aa, synthetic construct
GFTFSENDIG

SEQ ID NO: 2025 - protein, 10 aa, synthetic construct
GGTFSENDIG

SEQ ID NO: 2026 - protein, 10 aa, synthetic construct
GHTFSENDIG

SEQ ID NO: 2027 - protein, 10 aa, synthetic construct
GITFSENDIG

SEQ ID NO: 2028 - protein, 10 aa, synthetic construct
GKTFSENDIG

SEQ ID NO: 2029 - protein, 10 aa, synthetic construct
GLTFSENDIG

SEQ ID NO: 2030 - protein, 10 aa, synthetic construct
GPTFSENDIG

SEQ ID NO: 2031 - protein, 10 aa, synthetic construct
GQTFSENDIG

SEQ ID NO: 2032 - protein, 10 aa, synthetic construct
GRTFSENDIG

SEQ ID NO: 2033 - protein, 10 aa, synthetic construct
GSTFSENDIG

SEQ ID NO: 2034 - protein, 10 aa, synthetic construct
GTTFSENDIG

SEQ ID NO: 2035 - protein, 10 aa, synthetic construct
GVTFSENDIG

SEQ ID NO: 2036 - protein, 10 aa, synthetic construct
GYTFSENDIG

SEQ ID NO: 2037 - protein, 10 aa, synthetic construct
HDTFSENDIG

SEQ ID NO: 2038 - protein, 10 aa, synthetic construct
IDTFSENDIG

SEQ ID NO: 2039 - protein, 10 aa, synthetic construct
KDTFSENDIG

SEQ ID NO: 2040 - protein, 10 aa, synthetic construct
LDTFSENDIG

SEQ ID NO: 2041 - protein, 10 aa, synthetic construct
PDTFSENDIG

SEQ ID NO: 2042 - protein, 10 aa, synthetic construct
RDTFSENDIG

SEQ ID NO: 2043 - protein, 10 aa, synthetic construct
SDTFSENDIG

SEQ ID NO: 2044 - protein, 10 aa, synthetic construct
TDTFSENDIG

SEQ ID NO: 2045 - protein, 10 aa, synthetic construct
VDTFSENDIG

SEQ ID NO: 2046 - protein, 10 aa, synthetic construct
YDTFSENDIG

SEQ ID NO: 2047 - protein, 14 aa, synthetic construct
RFRQTPGKEREFVA

SEQ ID NO: 2048 - protein, 14 aa, synthetic construct
WFRQAPGKEREFVA

SEQ ID NO: 2049 - protein, 14 aa, synthetic construct
WFRQTPGKEREFVA

SEQ ID NO: 2050 - protein, 10 aa, synthetic construct
AAVWPGGETY

SEQ ID NO: 2051 - protein, 10 aa, synthetic construct
ADVWPGGETY

SEQ ID NO: 2052 - protein, 10 aa, synthetic construct
AEVWPGGETY

SEQ ID NO: 2053 - protein, 10 aa, synthetic construct
AFVWPGGETY

SEQ ID NO: 2054 - protein, 10 aa, synthetic construct
AGVWPGGETY

SEQ ID NO: 2055 - protein, 10 aa, synthetic construct
AHVWPGGETY

SEQ ID NO: 2056 - protein, 10 aa, synthetic construct
AIAWPGGETY

SEQ ID NO: 2057 - protein, 10 aa, synthetic construct
AIDWPGGETY

SEQ ID NO: 2058 - protein, 10 aa, synthetic construct
AIFWPGGETY

SEQ ID NO: 2059 - protein, 10 aa, synthetic construct
AIGWPGGETY

SEQ ID NO: 2060 - protein, 10 aa, synthetic construct
AIIWPGGETY

SEQ ID NO: 2061 - protein, 10 aa, synthetic construct
AIKWPGAETG

SEQ ID NO: 2062 - protein, 10 aa, synthetic construct
AIKWPGAETY

SEQ ID NO: 2063 - protein, 10 aa, synthetic construct
AIKWPGGETG

SEQ ID NO: 2064 - protein, 10 aa, synthetic construct
AIKWPGGETY

SEQ ID NO: 2065 - protein, 10 aa, synthetic construct
AIQWPGGETY

SEQ ID NO: 2066 - protein, 10 aa, synthetic construct
AIRWPGGETY

SEQ ID NO: 2067 - protein, 10 aa, synthetic construct
AISWPGGETY

SEQ ID NO: 2068 - protein, 10 aa, synthetic construct
AITWPGGETY

SEQ ID NO: 2069 - protein, 10 aa, synthetic construct
AIVAPGGETY

SEQ ID NO: 2070 - protein, 10 aa, synthetic construct
AIVDPGGETY

SEQ ID NO: 2071 - protein, 10 aa, synthetic construct
AIVFPGGETY

SEQ ID NO: 2072 - protein, 10 aa, synthetic construct
AIVGPGGETY

SEQ ID NO: 2073 - protein, 10 aa, synthetic construct
AIVHPGGETY

SEQ ID NO: 2074 - protein, 10 aa, synthetic construct
AIVIPGGETY

SEQ ID NO: 2075 - protein, 10 aa, synthetic construct
AIVKPGGETY

SEQ ID NO: 2076 - protein, 10 aa, synthetic construct
AIVLPGGETY

SEQ ID NO: 2077 - protein, 10 aa, synthetic construct
AIVPPGGETY

SEQ ID NO: 2078 - protein, 10 aa, synthetic construct
AIVQPGGETY

SEQ ID NO: 2079 - protein, 10 aa, synthetic construct
AIVRPGGETY

SEQ ID NO: 2080 - protein, 10 aa, synthetic construct
AIVSPGGETY

SEQ ID NO: 2081 - protein, 10 aa, synthetic construct
AIVTPGGETY

SEQ ID NO: 2082 - protein, 10 aa, synthetic construct
AIVVPGGETY

SEQ ID NO: 2083 - protein, 10 aa, synthetic construct
AIVWAGGETY

SEQ ID NO: 2084 - protein, 10 aa, synthetic construct
AIVWDGGETY

SEQ ID NO: 2085 - protein, 10 aa, synthetic construct
AIVWEGGETY

SEQ ID NO: 2086 - protein, 10 aa, synthetic construct
AIVWFGGETY

SEQ ID NO: 2087 - protein, 10 aa, synthetic construct
AIVWGGGETY

SEQ ID NO: 2088 - protein, 10 aa, synthetic construct
AIVWHGGETY

SEQ ID NO: 2089 - protein, 10 aa, synthetic construct
AIVWIGGETY

SEQ ID NO: 2090 - protein, 10 aa, synthetic construct
AIVWIGGETY

SEQ ID NO: 2091 - protein, 10 aa, synthetic construct
AIVWKGGETY

SEQ ID NO: 2092 - protein, 10 aa, synthetic construct
AIVWLGGETY

SEQ ID NO: 2093 - protein, 10 aa, synthetic construct
AIVWPAGETY

SEQ ID NO: 2094 - protein, 10 aa, synthetic construct
AIVWPEGETY

SEQ ID NO: 2095 - protein, 10 aa, synthetic construct
AIVWPFGETY

SEQ ID NO: 2096 - protein, 10 aa, synthetic construct
AIVWPGAETG

SEQ ID NO: 2097 - protein, 10 aa, synthetic construct
AIVWPGAETY

SEQ ID NO: 2098 - protein, 10 aa, synthetic construct
AIVWPGGATY

SEQ ID NO: 2099 - protein, 10 aa, synthetic construct
AIVWPGGDTY

SEQ ID NO: 2100 - protein, 10 aa, synthetic construct
AIVWPGGDTY

SEQ ID NO: 2101 - protein, 10 aa, synthetic construct
AIVWPGGEAY

SEQ ID NO: 2102 - protein, 10 aa, synthetic construct
AIVWPGGEDY

SEQ ID NO: 2103 - protein, 10 aa, synthetic construct
AIVWPGGEEY

SEQ ID NO: 2104 - protein, 10 aa, synthetic construct
AIVWPGGEFY

SEQ ID NO: 2105 - protein, 10 aa, synthetic construct
AIVWPGGEHY

SEQ ID NO: 2106 - protein, 10 aa, synthetic construct
AIVWPGGEIY

SEQ ID NO: 2107 - protein, 10 aa, synthetic construct
AIVWPGGEKY

SEQ ID NO: 2108 - protein, 10 aa, synthetic construct
AIVWPGGELY

SEQ ID NO: 2109 - protein, 10 aa, synthetic construct
AIVWPGGEPY

SEQ ID NO: 2110 - protein, 10 aa, synthetic construct
AIVWPGGEQY

SEQ ID NO: 2111 - protein, 10 aa, synthetic construct
AIVWPGGERY

SEQ ID NO: 2112 - protein, 10 aa, synthetic construct
AIVWPGGESY

SEQ ID NO: 2113 - protein, 10 aa, synthetic construct
AIVWPGGETA

SEQ ID NO: 2114 - protein, 10 aa, synthetic construct
AIVWPGGETD

SEQ ID NO: 2115 - protein, 10 aa, synthetic construct
AIVWPGGETE

SEQ ID NO: 2116 - protein, 10 aa, synthetic construct
AIVWPGGETF

SEQ ID NO: 2117 - protein, 10 aa, synthetic construct
AIVWPGGETG

SEQ ID NO: 2118 - protein, 10 aa, synthetic construct
AIVWPGGETH

SEQ ID NO: 2119 - protein, 10 aa, synthetic construct
AIVWPGGETI

SEQ ID NO: 2120 - protein, 10 aa, synthetic construct
AIVWPGGETK

SEQ ID NO: 2121 - protein, 10 aa, synthetic construct
AIVWPGGETL

SEQ ID NO: 2122 - protein, 10 aa, synthetic construct
AIVWPGGETP

SEQ ID NO: 2123 - protein, 10 aa, synthetic construct
AIVWPGGETQ

SEQ ID NO: 2124 - protein, 10 aa, synthetic construct
AIVWPGGETR

SEQ ID NO: 2125 - protein, 10 aa, synthetic construct
AIVWPGGETS

SEQ ID NO: 2126 - protein, 10 aa, synthetic construct
AIVWPGGETT

SEQ ID NO: 2127 - protein, 10 aa, synthetic construct
AIVWPGGETY

SEQ ID NO: 2128 - protein, 10 aa, synthetic construct
AIVWPGGEVY

SEQ ID NO: 2129 - protein, 10 aa, synthetic construct
AIVWPGGEYY

SEQ ID NO: 2130 - protein, 10 aa, synthetic construct
AIVWPGGFTY

SEQ ID NO: 2131 - protein, 10 aa, synthetic construct
AIVWPGGGTY

SEQ ID NO: 2132 - protein, 10 aa, synthetic construct
AIVWPGGHTY

SEQ ID NO: 2133 - protein, 10 aa, synthetic construct
AIVWPGGITY

SEQ ID NO: 2134 - protein, 10 aa, synthetic construct
AIVWPGGKTY

SEQ ID NO: 2135 - protein, 10 aa, synthetic construct
AIVWPGGLTY

SEQ ID NO: 2136 - protein, 10 aa, synthetic construct
AIVWPGGPTY

SEQ ID NO: 2137 - protein, 10 aa, synthetic construct
AIVWPGGPTY

SEQ ID NO: 2138 - protein, 10 aa, synthetic construct
AIVWPGGQTY

SEQ ID NO: 2139 - protein, 10 aa, synthetic construct
AIVWPGGRTY

SEQ ID NO: 2140 - protein, 10 aa, synthetic construct
AIVWPGGSTY

SEQ ID NO: 2141 - protein, 10 aa, synthetic construct
AIVWPGGTTY

SEQ ID NO: 2142 - protein, 10 aa, synthetic construct
AIVWPGGVTY

SEQ ID NO: 2143 - protein, 10 aa, synthetic construct
AIVWPGGYTY

SEQ ID NO: 2144 - protein, 10 aa, synthetic construct
AIVWPGHETY

SEQ ID NO: 2145 - protein, 10 aa, synthetic construct
AIVWPGHETY

SEQ ID NO: 2146 - protein, 10 aa, synthetic construct
AIVWPGIETY

SEQ ID NO: 2147 - protein, 10 aa, synthetic construct
AIVWPGKETY

SEQ ID NO: 2148 - protein, 10 aa, synthetic construct
AIVWPGLETY

SEQ ID NO: 2149 - protein, 10 aa, synthetic construct
AIVWPGPETY

SEQ ID NO: 2150 - protein, 10 aa, synthetic construct
AIVWPGQETY

SEQ ID NO: 2151 - protein, 10 aa, synthetic construct
AIVWPGRETY

SEQ ID NO: 2152 - protein, 10 aa, synthetic construct
AIVWPGSETY

SEQ ID NO: 2153 - protein, 10 aa, synthetic construct
AIVWPGTETY

SEQ ID NO: 2154 - protein, 10 aa, synthetic construct
AIVWPGVETY

SEQ ID NO: 2155 - protein, 10 aa, synthetic construct
AIVWPGYETY

SEQ ID NO: 2156 - protein, 10 aa, synthetic construct
AIVWPHGETY

SEQ ID NO: 2157 - protein, 10 aa, synthetic construct
AIVWPIGETY

SEQ ID NO: 2158 - protein, 10 aa, synthetic construct
AIVWPKGETY

SEQ ID NO: 2159 - protein, 10 aa, synthetic construct
AIVWPLGETY

SEQ ID NO: 2160 - protein, 10 aa, synthetic construct
AIVWPPGETY

SEQ ID NO: 2161 - protein, 10 aa, synthetic construct
AIVWPQGETY

SEQ ID NO: 2162 - protein, 10 aa, synthetic construct
AIVWPRGETY

SEQ ID NO: 2163 - protein, 10 aa, synthetic construct
AIVWPSGETY

SEQ ID NO: 2164 - protein, 10 aa, synthetic construct
AIVWPVGETY

SEQ ID NO: 2165 - protein, 10 aa, synthetic construct
AIVWQGGETY

SEQ ID NO: 2166 - protein, 10 aa, synthetic construct
AIVWSGGETY

SEQ ID NO: 2167 - protein, 10 aa, synthetic construct
AIVWTGGETY

SEQ ID NO: 2168 - protein, 10 aa, synthetic construct
AIVWVGGETY

SEQ ID NO: 2169 - protein, 10 aa, synthetic construct
AIVWYGGETY

SEQ ID NO: 2170 - protein, 10 aa, synthetic construct
AIVYPGGETY

SEQ ID NO: 2171 - protein, 10 aa, synthetic construct
AIYWPGGETY

SEQ ID NO: 2172 - protein, 10 aa, synthetic construct
AKVWPGGETY

SEQ ID NO: 2173 - protein, 10 aa, synthetic construct
ALVWPGGETY

SEQ ID NO: 2174 - protein, 10 aa, synthetic construct
APVWPGGETY

SEQ ID NO: 2175 - protein, 10 aa, synthetic construct
AQVWPGGETY

SEQ ID NO: 2176 - protein, 10 aa, synthetic construct
ARVWPGGETY

SEQ ID NO: 2177 - protein, 10 aa, synthetic construct
ASVWPGGETY

SEQ ID NO: 2178 - protein, 10 aa, synthetic construct
ASVWPGGETY

SEQ ID NO: 2179 - protein, 10 aa, synthetic construct
ATVWPGGETY

SEQ ID NO: 2180 - protein, 10 aa, synthetic construct
AVVWPGGETY

SEQ ID NO: 2181 - protein, 10 aa, synthetic construct
AYVWPGGETY

SEQ ID NO: 2182 - protein, 10 aa, synthetic construct
FIVWPGGETY

SEQ ID NO: 2183 - protein, 10 aa, synthetic construct
GIKWPGGETG

SEQ ID NO: 2184 - protein, 10 aa, synthetic construct
GIVWPGGETY

SEQ ID NO: 2185 - protein, 10 aa, synthetic construct
HIVWPGGETY

SEQ ID NO: 2186 - protein, 10 aa, synthetic construct
IIVWPGGETY

SEQ ID NO: 2187 - protein, 10 aa, synthetic construct
KIVWPGGETY

SEQ ID NO: 2188 - protein, 10 aa, synthetic construct
LIVWPGGETY

SEQ ID NO: 2189 - protein, 10 aa, synthetic construct
PIVWPGGETY

SEQ ID NO: 2190 - protein, 10 aa, synthetic construct
QIVWPGGETY

SEQ ID NO: 2191 - protein, 10 aa, synthetic construct
RIVWPGGETY

SEQ ID NO: 2192 - protein, 10 aa, synthetic construct
SIVWPGGETY

SEQ ID NO: 2193 - protein, 10 aa, synthetic construct
TIVWPGGETY

SEQ ID NO: 2194 - protein, 10 aa, synthetic construct
VIVWPGGETY

SEQ ID NO: 2195 - protein, 10 aa, synthetic construct
YIVWPGGETY

SEQ ID NO: 2196 - protein, 39 aa, synthetic construct
YADAVKGRFTISRDNAKNTVYLQMNSLRPEDTALYYCAV

SEQ ID NO: 2197 - protein, 39 aa, synthetic construct
YADDVKGRFTISRDNAKNTVYLQMNSLRPEDTALYYCAV

SEQ ID NO: 2198 - protein, 39 aa, synthetic construct
YADEVKGRFTISRDNAKNTVYLQMNSLRPEDTALYYCAV

SEQ ID NO: 2199 - protein, 39 aa, synthetic construct
YADFVKGRFTISRDNAKNTVYLQMNSLRPEDTALYYCAV

SEQ ID NO: 2200 - protein, 39 aa, synthetic construct
YADGVKGRFTISRDNAKNTVYLQMNSLRPEDTALYYCAV

SEQ ID NO: 2201 - protein, 39 aa, synthetic construct
YADHVKGRFTISRDNAKNTVYLQMNSLRPEDTALYYCAV

SEQ ID NO: 2202 - protein, 39 aa, synthetic construct
YADIVKGRFTISRDNAKNTVYLQMNSLRPEDTALYYCAV

SEQ ID NO: 2203 - protein, 39 aa, synthetic construct
YADKVKGRFTISRDNAKNTVYLQMNSLRPEDTALYYCAV

SEQ ID NO: 2204 - protein, 39 aa, synthetic construct
YADLVKGRFTISRDNAKNTVYLQMNSLRPEDTALYYCAV

SEQ ID NO: 2205 - protein, 39 aa, synthetic construct
YADPVKGRFTISRDNAKNTVYLQMNSLRPEDTALYYCAV

SEQ ID NO: 2206 - protein, 39 aa, synthetic construct
YADQVKGRFTISRDNAKNTVYLQMNSLRPEDTALYYCAV

SEQ ID NO: 2207 - protein, 39 aa, synthetic construct
YADRVKGRFTISRDNAKNTVYLQMNSLRPEDTALYYCAV

SEQ ID NO: 2208 - protein, 39 aa, synthetic construct
YADSVKGRFTISRDNAKNTVYLQMNSLRPEDTALYSCAV

SEQ ID NO: 2209 - protein, 39 aa, synthetic construct
YADSVKGRFTISRDNAKNTVYLQMNSLRPEDTALYYCAV

SEQ ID NO: 2210 - protein, 39 aa, synthetic construct
YADSVKGRFTLSRDNAKNTVYLQMNSLRPEDTALYSCAV

SEQ ID NO: 2211 - protein, 39 aa, synthetic construct
YADSVKGRFTLSRDNAKNTVYLQMNSLRPEDTALYYCAV

SEQ ID NO: 2212 - protein, 39 aa, synthetic construct
YADTVKGRFTISRDNAKNTVYLQMNSLRPEDTALYYCAV

SEQ ID NO: 2213 - protein, 39 aa, synthetic construct
YADVVKGRFTISRDNAKNTVYLQMNSLRPEDTALYYCAV

SEQ ID NO: 2214 - protein, 39 aa, synthetic construct
YADYVKGRFTISRDNAKNTVYLQMNSLRPEDTALYYCAV

SEQ ID NO: 2215 - protein, 39 aa, synthetic construct
YEDSVKGRFTLSRDNAKNTVYLQMNSLRPEDTALYSCAV

SEQ ID NO: 2216 - protein, 39 aa, synthetic construct
YFDSVKGRFTLSRDNAKNTVYLQMNSLRPEDTALYSCAV

SEQ ID NO: 2217 - protein, 39 aa, synthetic construct
YGDSVKGRFTLSRDNAKNTVYLQMNSLRPEDTALYSCAV

SEQ ID NO: 2218 - protein, 39 aa, synthetic construct
YHDSVKGRFTLSRDNAKNTVYLQMNSLRPEDTALYSCAV

SEQ ID NO: 2219 - protein, 39 aa, synthetic construct
YIDSVKGRFTLSRDNAKNTVYLQMNSLRPEDTALYSCAV

SEQ ID NO: 2220 - protein, 39 aa, synthetic construct
YKDAVKGRFTLSRDNAKNTVYLQMNSLRPEDTALYYCAQ

SEQ ID NO: 2221 - protein, 39 aa, synthetic construct
YKDAVKGRFTLSRDNAKNTVYLQMNSLRPEDTALYYCAV

SEQ ID NO: 2222 - protein, 39 aa, synthetic construct
YKDKVKGRFTLSRDNAKNTVDLQMNSLRPEDTALYYCAV

SEQ ID NO: 2223 - protein, 39 aa, synthetic construct
YKDKVKGRFTLSRDNAKNTVSLQMNSLRPEDTALYYCAV

SEQ ID NO: 2224 - protein, 39 aa, synthetic construct
YKDKVKGRFTLSRDNAKNTVYLQMNSLRPEDTALYYCAQ

SEQ ID NO: 2225 - protein, 39 aa, synthetic construct
YKDKVKGRFTLSRDNAKNTVYLQMNSLRPEDTALYYCAV

SEQ ID NO: 2226 - protein, 39 aa, synthetic construct
YKDSVKGRFTLSRDNAKNTVYLQMNSLRPEDTALYSCAV

SEQ ID NO: 2227 - protein, 39 aa, synthetic construct
YLDSVKGRFTLSRDNAKNTVYLQMNSLRPEDTALYSCAV

SEQ ID NO: 2228 - protein, 39 aa, synthetic construct
YPDSVKGRFTLSRDNAKNTVYLQMNSLRPEDTALYSCAV

SEQ ID NO: 2229 - protein, 39 aa, synthetic construct
YRDAVKGRFTLSRDNAKNTVYLQMNSLRPEDTALYYCAQ

SEQ ID NO: 2230 - protein, 39 aa, synthetic construct
YRDAVKGRFTLSRDNAKNTVYLQMNSLRPEDTALYYCAV

SEQ ID NO: 2231 - protein, 39 aa, synthetic construct
YRDKVKGRFTLSRDEAKNTVSLQMNSLRPEDTALYYCAV

SEQ ID NO: 2232 - protein, 39 aa, synthetic construct
YRDKVKGRFTLSRDFAKNTVSLQMNSLRPEDTALYYCAV

SEQ ID NO: 2233 - protein, 39 aa, synthetic construct
YRDKVKGRFTLSRDIAKNTVSLQMNSLRPEDTALYYCAV

SEQ ID NO: 2234 - protein, 39 aa, synthetic construct
YRDKVKGRFTLSRDKAKNTVSLQMNSLRPEDTALYYCAV

SEQ ID NO: 2235 - protein, 39 aa, synthetic construct
YRDKVKGRFTLSRDKAKNTVYLQMNSLRAEDTALYYCAV

SEQ ID NO: 2236 - protein, 39 aa, synthetic construct
YRDKVKGRFTLSRDKAKNTVYLQMNSLRPEDTALYYCAV

SEQ ID NO: 2237 - protein, 39 aa, synthetic construct
YRDKVKGRFTLSRDLAKNTVSLQMNSLRPEDTALYYCAV

SEQ ID NO: 2238 - protein, 39 aa, synthetic construct
YRDKVKGRFTLSRDLAKNTVYLQMNSLRAEDTALYYCAV

SEQ ID NO: 2239 - protein, 39 aa, synthetic construct
YRDKVKGRFTLSRDLAKNTVYLQMNSLRPEDTALYYCAV

SEQ ID NO: 2240 - protein, 39 aa, synthetic construct
YRDKVKGRFTLSRDNAKNTVDLQMNSLRPEDTALYYCAL

SEQ ID NO: 2241 - protein, 39 aa, synthetic construct
YRDKVKGRFTLSRDNAKNTVDLQMNSLRPEDTALYYCAV

SEQ ID NO: 2242 - protein, 39 aa, synthetic construct
YRDKVKGRFTLSRDNAKNTVSLQMNSLRPEDTALYYCAL

SEQ ID NO: 2243 - protein, 39 aa, synthetic construct
YRDKVKGRFTLSRDNAKNTVSLQMNSLRPEDTALYYCAV

SEQ ID NO: 2244 - protein, 39 aa, synthetic construct
YRDKVKGRFTLSRDNAKNTVYLQMNSLRPEDTALYYCAQ

SEQ ID NO: 2245 - protein, 39 aa, synthetic construct
YRDKVKGRFTLSRDNAKNTVYLQMNSLRPEDTALYYCAV

SEQ ID NO: 2246 - protein, 39 aa, synthetic construct
YRDKVKGRFTLSRDNIKNTVSLQMNSLRPEDTALYYCAV

SEQ ID NO: 2247 - protein, 39 aa, synthetic construct
YRDKVKGRFTLSRDNKKNTVSLQMNSLRPEDTALYYCAV

SEQ ID NO: 2248 - protein, 39 aa, synthetic construct
YRDKVKGRFTLSRDNLKNTVSLQMNSLRPEDTALYYCAV

SEQ ID NO: 2249 - protein, 39 aa, synthetic construct
YRDKVKGRFTLSRDNRKNTVSLQMNSLRPEDTALYYCAV

SEQ ID NO: 2250 - protein, 39 aa, synthetic construct
YRDKVKGRFTLSRDNVKNTVSLQMNSLRPEDTALYYCAV

SEQ ID NO: 2251 - protein, 39 aa, synthetic construct
YRDKVKGRFTLSRDNYKNTVSLQMNSLRPEDTALYYCAV

SEQ ID NO: 2252 - protein, 39 aa, synthetic construct
YRDKVKGRFTLSRDPAKNTVSLQMNSLRPEDTALYYCAV

SEQ ID NO: 2253 - protein, 39 aa, synthetic construct
YRDKVKGRFTLSRDQAKNTVSLQMNSLRPEDTALYYCAV

SEQ ID NO: 2254 - protein, 39 aa, synthetic construct
YRDKVKGRFTLSRDVAKNTVSLQMNSLRPEDTALYYCAV

SEQ ID NO: 2255 - protein, 39 aa, synthetic construct
YRDKVKGRFTLSRDVAKNTVYLQMNSLRAEDTALYYCAV

SEQ ID NO: 2256 - protein, 39 aa, synthetic construct
YRDKVKGRFTLSRDVAKNTVYLQMNSLRPEDMALYYCAV

SEQ ID NO: 2257 - protein, 39 aa, synthetic construct
YRDKVKGRFTLSRDVAKNTVYLQMNSLRPEDTALYYCAV

SEQ ID NO: 2258 - protein, 39 aa, synthetic construct
YRDKVKGRFTLSRDYAKNTVSLQMNSLRPEDTALYYCAV

SEQ ID NO: 2259 - protein, 39 aa, synthetic construct
YRDSMKGRFTLSRDNAKNTVYLQMNSLRPEDTALYSCQV

SEQ ID NO: 2260 - protein, 39 aa, synthetic construct
YRDSVKGRFTFSRDNAKNTVYLQMNSLRPEDTALYSCAV

SEQ ID NO: 2261 - protein, 39 aa, synthetic construct
YRDSVKGRFTISRDNAKNTVYLQMNSLRPEDTALYSCAV

SEQ ID NO: 2262 - protein, 39 aa, synthetic construct
YRDSVKGRFTISRDNAKNTVYLQMNSLRPEDTALYYCAV

SEQ ID NO: 2263 - protein, 39 aa, synthetic construct
YRDSVKGRFTLPRDNAKNTVYLQMNSLRPEDTALYSCAV

SEQ ID NO: 2264 - protein, 39 aa, synthetic construct
YRDSVKGRFTLSRDAAKNTVYLQMNSLRPEDTALYSCAV

SEQ ID NO: 2265 - protein, 39 aa, synthetic construct
YRDSVKGRFTLSRDEAKNTVYLQMNSLRPEDTALYSCAV

SEQ ID NO: 2266 - protein, 39 aa, synthetic construct
YRDSVKGRFTLSRDGAKNTVYLQMNSLRPEDTALYSCAV

SEQ ID NO: 2267 - protein, 39 aa, synthetic construct
YRDSVKGRFTLSRDHAKNTVYLQMNSLRPEDTALYSCAV

SEQ ID NO: 2268 - protein, 39 aa, synthetic construct
YRDSVKGRFTLSRDIAKNTVYLQMNSLRPEDTALYSCAV

SEQ ID NO: 2269 - protein, 39 aa, synthetic construct
YRDSVKGRFTLSRDKAKNTVYLQMNSLRPEDTALYSCAV

SEQ ID NO: 2270 - protein, 39 aa, synthetic construct
YRDSVKGRFTLSRDLAKNTVYLQMNSLRPEDTALYSCAV

SEQ ID NO: 2271 - protein, 39 aa, synthetic construct
YRDSVKGRFTLSRDNAENTVYLQMNSLRPEDTALYSCAV

SEQ ID NO: 2272 - protein, 39 aa, synthetic construct
YRDSVKGRFTLSRDNAKNTVDLQMNSLRPEDTALYSCAV

SEQ ID NO: 2273 - protein, 39 aa, synthetic construct
YRDSVKGRFTLSRDNAKNTVHLQMNSLRPEDTALYSCAV

SEQ ID NO: 2274 - protein, 39 aa, synthetic construct
YRDSVKGRFTLSRDNAKNTVSLQMNSLRPEDTALYSCAV

SEQ ID NO: 2275 - protein, 39 aa, synthetic construct
YRDSVKGRFTLSRDNAKNTVYLQMNNLKPEDTANYSCAV

SEQ ID NO: 2276 - protein, 39 aa, synthetic construct
YRDSVKGRFTLSRDNAKNTVYLQMNSLRPEDMALYSCAV

SEQ ID NO: 2277 - protein, 39 aa, synthetic construct
YRDSVKGRFTLSRDNAKNTVYLQMNSLRPEDTALYDCAV

SEQ ID NO: 2278 - protein, 39 aa, synthetic construct
YRDSVKGRFTLSRDNAKNTVYLQMNSLRPEDTALYECAV

SEQ ID NO: 2279 - protein, 39 aa, synthetic construct
YRDSVKGRFTLSRDNAKNTVYLQMNSLRPEDTALYFCAV

SEQ ID NO: 2280 - protein, 39 aa, synthetic construct
YRDSVKGRFTLSRDNAKNTVYLQMNSLRPEDTALYGCAV

SEQ ID NO: 2281 - protein, 39 aa, synthetic construct
YRDSVKGRFTLSRDNAKNTVYLQMNSLRPEDTALYHCAV

SEQ ID NO: 2282 - protein, 39 aa, synthetic construct
YRDSVKGRFTLSRDNAKNTVYLQMNSLRPEDTALYICAV

SEQ ID NO: 2283 - protein, 39 aa, synthetic construct
YRDSVKGRFTLSRDNAKNTVYLQMNSLRPEDTALYKCAV

SEQ ID NO: 2284 - protein, 39 aa, synthetic construct
YRDSVKGRFTLSRDNAKNTVYLQMNSLRPEDTALYPCAV

SEQ ID NO: 2285 - protein, 39 aa, synthetic construct
YRDSVKGRFTLSRDNAKNTVYLQMNSLRPEDTALYQCAV

SEQ ID NO: 2286 - protein, 39 aa, synthetic construct
YRDSVKGRFTLSRDNAKNTVYLQMNSLRPEDTALYRCAV

SEQ ID NO: 2287 - protein, 39 aa, synthetic construct
YRDSVKGRFTLSRDNAKNTVYLQMNSLRPEDTALYSCAA

SEQ ID NO: 2288 - protein, 39 aa, synthetic construct
YRDSVKGRFTLSRDNAKNTVYLQMNSLRPEDTALYSCAD

SEQ ID NO: 2289 - protein, 39 aa, synthetic construct
YRDSVKGRFTLSRDNAKNTVYLQMNSLRPEDTALYSCAE

SEQ ID NO: 2290 - protein, 39 aa, synthetic construct
YRDSVKGRFTLSRDNAKNTVYLQMNSLRPEDTALYSCAG

SEQ ID NO: 2291 - protein, 39 aa, synthetic construct
YRDSVKGRFTLSRDNAKNTVYLQMNSLRPEDTALYSCAI

SEQ ID NO: 2292 - protein, 39 aa, synthetic construct
YRDSVKGRFTLSRDNAKNTVYLQMNSLRPEDTALYSCAK

SEQ ID NO: 2293 - protein, 39 aa, synthetic construct
YRDSVKGRFTLSRDNAKNTVYLQMNSLRPEDTALYSCAL

SEQ ID NO: 2294 - protein, 39 aa, synthetic construct
YRDSVKGRFTLSRDNAKNTVYLQMNSLRPEDTALYSCAP

SEQ ID NO: 2295 - protein, 39 aa, synthetic construct
YRDSVKGRFTLSRDNAKNTVYLQMNSLRPEDTALYSCAQ

SEQ ID NO: 2296 - protein, 39 aa, synthetic construct
YRDSVKGRFTLSRDNAKNTVYLQMNSLRPEDTALYSCAR

SEQ ID NO: 2297 - protein, 39 aa, synthetic construct
YRDSVKGRFTLSRDNAKNTVYLQMNSLRPEDTALYSCAS

SEQ ID NO: 2298 - protein, 39 aa, synthetic construct
YRDSVKGRFTLSRDNAKNTVYLQMNSLRPEDTALYSCAT

SEQ ID NO: 2299 - protein, 39 aa, synthetic construct
YRDSVKGRFTLSRDNAKNTVYLQMNSLRPEDTALYSCAV

SEQ ID NO: 2300 - protein, 39 aa, synthetic construct
YRDSVKGRFTLSRDNAKNTVYLQMNSLRPEDTALYSCAY

SEQ ID NO: 2301 - protein, 39 aa, synthetic construct
YRDSVKGRFTLSRDNAKNTVYLQMNSLRPEDTALYSCDV

SEQ ID NO: 2302 - protein, 39 aa, synthetic construct
YRDSVKGRFTLSRDNAKNTVYLQMNSLRPEDTALYSCEV

SEQ ID NO: 2303 - protein, 39 aa, synthetic construct
YRDSVKGRFTLSRDNAKNTVYLQMNSLRPEDTALYSCFV

SEQ ID NO: 2304 - protein, 39 aa, synthetic construct
YRDSVKGRFTLSRDNAKNTVYLQMNSLRPEDTALYSCGV

SEQ ID NO: 2305 - protein, 39 aa, synthetic construct
YRDSVKGRFTLSRDNAKNTVYLQMNSLRPEDTALYSCHV

SEQ ID NO: 2306 - protein, 39 aa, synthetic construct
YRDSVKGRFTLSRDNAKNTVYLQMNSLRPEDTALYSCIV

SEQ ID NO: 2307 - protein, 39 aa, synthetic construct
YRDSVKGRFTLSRDNAKNTVYLQMNSLRPEDTALYSCKV

SEQ ID NO: 2308 - protein, 39 aa, synthetic construct
YRDSVKGRFTLSRDNAKNTVYLQMNSLRPEDTALYSCLV

SEQ ID NO: 2309 - protein, 39 aa, synthetic construct
YRDSVKGRFTLSRDNAKNTVYLQMNSLRPEDTALYSCPV

SEQ ID NO: 2310 - protein, 39 aa, synthetic construct
YRDSVKGRFTLSRDNAKNTVYLQMNSLRPEDTALYSCQV

SEQ ID NO: 2311 - protein, 39 aa, synthetic construct
YRDSVKGRFTLSRDNAKNTVYLQMNSLRPEDTALYSCRV

SEQ ID NO: 2312 - protein, 39 aa, synthetic construct
YRDSVKGRFTLSRDNAKNTVYLQMNSLRPEDTALYSCSV

SEQ ID NO: 2313 - protein, 39 aa, synthetic construct
YRDSVKGRFTLSRDNAKNTVYLQMNSLRPEDTALYSCTV

SEQ ID NO: 2314 - protein, 39 aa, synthetic construct
YRDSVKGRFTLSRDNAKNTVYLQMNSLRPEDTALYSCVV

SEQ ID NO: 2315 - protein, 39 aa, synthetic construct
YRDSVKGRFTLSRDNAKNTVYLQMNSLRPEDTALYSCYV

SEQ ID NO: 2316 - protein, 39 aa, synthetic construct
YRDSVKGRFTLSRDNAKNTVYLQMNSLRPEDTALYTCAV

SEQ ID NO: 2317 - protein, 39 aa, synthetic construct
YRDSVKGRFTLSRDNAKNTVYLQMNSLRPEDTALYVCAV

SEQ ID NO: 2318 - protein, 39 aa, synthetic construct
YRDSVKGRFTLSRDNAKNTVYLQMNSLRPEDTALYYCAV

SEQ ID NO: 2319 - protein, 39 aa, synthetic construct
YRDSVKGRFTLSRDNAKNTVYLQMNSLRPEDTAMYSCAV

SEQ ID NO: 2320 - protein, 39 aa, synthetic construct
YRDSVKGRFTLSRDNAKNTVYLQMNSLRPEDTASYSCAV

SEQ ID NO: 2321 - protein, 39 aa, synthetic construct
YRDSVKGRFTLSRDNAKNTVYLQMNSLRPEDTDLYSCAV

SEQ ID NO: 2322 - protein, 39 aa, synthetic construct
YRDSVKGRFTLSRDNAKNTVYLQMNSLRPEDTSLYSCAV

SEQ ID NO: 2323 - protein, 39 aa, synthetic construct
YRDSVKGRFTLSRDNAKNTVYLQMNSLRPGDTALYSCAV

SEQ ID NO: 2324 - protein, 39 aa, synthetic construct
YRDSVKGRFTLSRDNAKNTVYLQMSSLRPEDTALYSCAV

SEQ ID NO: 2325 - protein, 39 aa, synthetic construct
YRDSVKGRFTLSRDNTKNTVYLQMNSLRPEDTALYSCAV

SEQ ID NO: 2326 - protein, 39 aa, synthetic construct
YRDSVKGRFTLSRDPAKNTVYLQMNSLRPEDTALYSCAV

SEQ ID NO: 2327 - protein, 39 aa, synthetic construct
YRDSVKGRFTLSRDQAKNTVYLQMNSLRPEDTALYSCAV

SEQ ID NO: 2328 - protein, 39 aa, synthetic construct
YRDSVKGRFTLSRDRAKNTVYLQMNSLRPEDTALYSCAV

SEQ ID NO: 2329 - protein, 39 aa, synthetic construct
YRDSVKGRFTLSRDSAKNTVYLQMNSLRPEDTALYSCAV

SEQ ID NO: 2330 - protein, 39 aa, synthetic construct
YRDSVKGRFTLSRDTAKNTVYLQMNSLRPEDTALYSCAV

SEQ ID NO: 2331 - protein, 39 aa, synthetic construct
YRDSVKGRFTLSRDVAKNTVYLQMNSLRPEDTALYSCAV

SEQ ID NO: 2332 - protein, 39 aa, synthetic construct
YRDSVKGRFTLSRDYAKNTVYLQMNSLRPEDTALYSCAV

SEQ ID NO: 2333 - protein, 39 aa, synthetic construct
YRDSVKGRSTLSRDNAKNTVYLQMNSLRPEDTALYSCAV

SEQ ID NO: 2334 - protein, 39 aa, synthetic construct
YSDSVKGRFTLSRDNAKNTVYLQMNSLRPEDTALYSCAV

SEQ ID NO: 2335 - protein, 39 aa, synthetic construct
YTDSVKGRFTLSRDNAKNTVYLQMNSLRPEDTALYSCAV

SEQ ID NO: 2336 - protein, 39 aa, synthetic construct
YYDSVKGRFTLSRDNAKNTVYLQMNSLRPEDTALYSCAV

SEQ ID NO: 2337 - protein, 17 aa, synthetic construct
KIFSKTGTYSASWEYDF

SEQ ID NO: 2338 - protein, 17 aa, synthetic construct
KIFSTTGTYSASWEYDF

SEQ ID NO: 2339 - protein, 17 aa, synthetic construct
KHFSKTGTYSASWEYDF

SEQ ID NO: 2340 - protein, 17 aa, synthetic construct
KIFSKTGTYSASWEQDF

SEQ ID NO: 2341 - protein, 17 aa, synthetic construct
KIFSKTGTYSASWELDF

SEQ ID NO: 2342 - protein, 17 aa, synthetic construct
KIFSKTGTYSASWEGDF

SEQ ID NO: 2343 - protein, 17 aa, synthetic construct
KIFSKTGTYSASWRYDF

SEQ ID NO: 2344 - protein, 17 aa, synthetic construct
KIFSKTGTYSASWPYDF

SEQ ID NO: 2345 - protein, 17 aa, synthetic construct
AIFSKTGTYSASWEYDF

SEQ ID NO: 2346 - protein, 17 aa, synthetic construct
DIFSKTGTYSASWEYDF

SEQ ID NO: 2347 - protein, 17 aa, synthetic construct
EIFSKTGTYSASWEYDF

SEQ ID NO: 2348 - protein, 17 aa, synthetic construct
FIFSKTGTYSASWEYDF

SEQ ID NO: 2349 - protein, 17 aa, synthetic construct
HIFSKTGTYSASWEYDF

SEQ ID NO: 2350 - protein, 17 aa, synthetic construct
IIFSKTGTYSASWEYDF

SEQ ID NO: 2351 - protein, 17 aa, synthetic construct
KAFSKTGTYSASWEYDF

SEQ ID NO: 2352 - protein, 17 aa, synthetic construct
KDFSKTGTYSASWEYDF

SEQ ID NO: 2353 - protein, 17 aa, synthetic construct
KDFSKTGTYSSSWEYDF

SEQ ID NO: 2354 - protein, 17 aa, synthetic construct
KEFSKTGTYSASWEYDF

SEQ ID NO: 2355 - protein, 17 aa, synthetic construct
KFFSKTGTYSASWEYDF

SEQ ID NO: 2356 - protein, 17 aa, synthetic construct
KGFSKTGTYSASWEYDF

SEQ ID NO: 2357 - protein, 17 aa, synthetic construct
KIASKTGTYSASWEYDF

SEQ ID NO: 2358 - protein, 17 aa, synthetic construct
KIDSKTGTYSASWEYDF

SEQ ID NO: 2359 - protein, 17 aa, synthetic construct
KIESKTGTYSASWEYDF

SEQ ID NO: 2360 - protein, 17 aa, synthetic construct
KIFAKTGTYSASWEYDF

SEQ ID NO: 2361 - protein, 17 aa, synthetic construct
KIFDKTGTYSASWEYDF

SEQ ID NO: 2362 - protein, 17 aa, synthetic construct
KIFFKTGTYSASWEYDF

SEQ ID NO: 2363 - protein, 17 aa, synthetic construct
KIFGKTGTYSAGWEYDF

SEQ ID NO: 2364 - protein, 17 aa, synthetic construct
KIFSKTGTYSASWIYDF

SEQ ID NO: 2365 - protein, 17 aa, synthetic construct
KIFSKTGTYSASWEYLF

SEQ ID NO: 2366 - protein, 17 aa, synthetic construct
KIFSKTGTYSASWTYDF

SEQ ID NO: 2367 - protein, 17 aa, synthetic construct
KIFSKTGTYSASWAYDF

SEQ ID NO: 2368 - protein, 17 aa, synthetic construct
KIFSKTGTYSASWFYDF

SEQ ID NO: 2369 - protein, 17 aa, synthetic construct
KIFSKTGTYSASWDYDF

SEQ ID NO: 2370 - protein, 17 aa, synthetic construct
KIFSKTGTYSASWSYDF

SEQ ID NO: 2371 - protein, 17 aa, synthetic construct
KIFSKTGTYSASWHYDF

SEQ ID NO: 2372 - protein, 17 aa, synthetic construct
KIFSKTGTYSASWVYDF

SEQ ID NO: 2373 - protein, 17 aa, synthetic construct
KIFSKTGTYSASWKYDF

SEQ ID NO: 2374 - protein, 17 aa, synthetic construct
KIFSKTGTYSASWEVDF

SEQ ID NO: 2375 - protein, 17 aa, synthetic construct
KIFSKTGTYSASWEYEF

SEQ ID NO: 2376 - protein, 17 aa, synthetic construct
KIFSKTGTYSASWEPDF

SEQ ID NO: 2377 - protein, 17 aa, synthetic construct
KIFSKTGTYSASWEYFF

SEQ ID NO: 2378 - protein, 17 aa, synthetic construct
KIFSKTGTYSASWEYPF

SEQ ID NO: 2379 - protein, 17 aa, synthetic construct
KIFSKTGTYSASWEYRF

SEQ ID NO: 2380 - protein, 17 aa, synthetic construct
KIFSKTGTYSASWEYTF

SEQ ID NO: 2381 - protein, 17 aa, synthetic construct
KIFSKTGTYSASWEYIF

SEQ ID NO: 2382 - protein, 17 aa, synthetic construct
KIFSKTGTYSASWEYSF

SEQ ID NO: 2383 - protein, 17 aa, synthetic construct
KIFSKTGTYSASWEYYF

SEQ ID NO: 2384 - protein, 17 aa, synthetic construct
KIFSKTGTYSASWEYGF

SEQ ID NO: 2385 - protein, 17 aa, synthetic construct
KIFSKTGTYSASWEKDF

SEQ ID NO: 2386 - protein, 17 aa, synthetic construct
KIFSKTGTYSASWEEDF

SEQ ID NO: 2387 - protein, 17 aa, synthetic construct
KIFSKTGTYSASWEIDF

SEQ ID NO: 2388 - protein, 17 aa, synthetic construct
KIFSKTGTYSASWERDF

SEQ ID NO: 2389 - protein, 17 aa, synthetic construct
KIFIKTGTYSASWEYDF

SEQ ID NO: 2390 - protein, 17 aa, synthetic construct
KIFSKTGTYSASWEDDF

SEQ ID NO: 2391 - protein, 25 aa, synthetic construct
EVQLGESGGGVVQPGGSLRLSCAAT

SEQ ID NO: 2392 - protein, 10 aa, synthetic construct
GFTLDYYVKG

SEQ ID NO: 2393 - protein, 10 aa, synthetic construct
CLSSNADRIN

SEQ ID NO: 2394 - protein, 10 aa, synthetic construct
  VARIANT 6: note = A can be replaced by D, Q, P, S, G, T, V, I, R, K, E, L, H, F, or Y
  VARIANT 8: note = V can be replaced by F
  VARIANT 9: note = I can be replaced by E, D, A, F, G, H, L, K, T, M, S, P, R, Y, V, or Q
GFTLDAYVIG

SEQ ID NO: 2395 - protein, 10 aa, synthetic construct
  VARIANT 2: note = L can be replaced by G, H, K, P, R, S, or T
  VARIANT 4: note = S can be replaced by E, G, H, P, or Q
  VARIANT 5: note = N can be replaced by E, A, D, F, G, H, I, K, L, P, Q, R, S, T, V, or Y
  VARIANT 6: note = G can be replaced by D, F, H, K, L, P, Q, R, S, T, V, A, or Y
  VARIANT 9: note = I can be replaced by A, E, G, H, K, P, R, S, or T
  VARIANT 10: note = N can be replaced by A, D, E, F, G, H, I, K, L, P, Q, R, S, T, V, or Y
CLSSNGDRIN

SEQ ID NO: 2396 - protein, 18 aa, synthetic construct
  VARIANT 1: note = A can be replaced by G
  VARIANT 2: note = T can be replaced by A, E, G, F, I, D, H, K, S, P, R, Q, Y, V, or L
  VARIANT 5: note = T can be replaced by I
  VARIANT 8: note = D can be replaced by G
  VARIANT 9: note = L can be replaced by M, I, E, A, V, D, H, G, F, L, K, R, P, S, T, or Y
  VARIANT 11: note = G can be replaced by F
  VARIANT 13: note = I can be replaced by M, F, Y, L, A, D, E, G, K, H, P, Q, S, T, V, or R
  VARIANT 15: note = L can be replaced by V, or F
  VARIANT 18: note = Y can be replaced by E, I, L, or V
ATSTTVRDLCGIIYLYDY

SEQ ID NO: 2397 - protein, 25 aa, synthetic construct
DVQLVESGGGVVQPGGSLRLSCAAT

SEQ ID NO: 2398 - protein, 11 aa, synthetic construct
WGKGTLVTVSS

SEQ ID NO: 2399 - protein, 11 aa, synthetic construct
WGQGTPVTVSS

SEQ ID NO: 2400 - protein, 11 aa, synthetic construct
WGRGTLVTVSS

SEQ ID NO: 2401 - protein, 115 aa, synthetic construct [sequence omitted]

SEQ ID NO: 2402 - protein, 115 aa, synthetic construct [sequence omitted]

SEQ ID NO: 2403 - protein, 116 aa, synthetic construct
EVQLVESGGGVVQPGNSLRLSCAASGFTFSSFGMSWVRQAPGKGLEWVSSISGSGSDTLYADSVKGRFTISRDNAKTTLYLQMNSLRPEDTATYYCTIGGSLSRSSQGTLVTVSSA

SEQ ID NO: 2404 - protein, 116 aa, synthetic construct
EVQLVESGGGVVQPGGSLRLSCAASGFTFRSFGMSWVRQAPGKGPEWVSSISGSGSDTLYADSVKGRFTISRDNSKNTLYLQMNSLRPEDTATYYCTIGGSLSRSSQGTLVTVSSA

SEQ ID NO: 2405 - protein, 115 aa, synthetic construct [sequence omitted]

SEQ ID NO: 2406 - protein, 116 aa, synthetic construct
EVQLVESGGGLVQPGNSLRLSCAASGFTFSSFGMSWVRQAPGKGLEWVSSISGSGSDTLYADSVKGRFTISRDNAKTTLYLQMNSLRPEDTAVYYCTIGGSLSRSSQGTLVKVSSA

SEQ ID NO: 2407 - protein, 115 aa, synthetic construct
EVQLVESGGGVVQPGNSLRLSCAASGFTFSSFGMSWVRQAPGKGLEWVSSISGSGSDTLYADSVKGRFTISRDNAKTTLYLQMNSLRPEDTALYYCTIGGSLSRSSQGTLVTVSS

SEQ ID NO: 2408 - protein, 116 aa, synthetic construct
EVQLVESGGGVVQPGNSLRLSCAASGFTFSSFGMSWVRQAPGKGLEWVSSISGSGSDTLYADSVKGRFTISRDNAKTTLYLQMNSLRPEDTALYYCTIGGSLSRSSQGTLVTVSSA

SEQ ID NO: 2409 - protein, 117 aa, synthetic construct
EVQLVESGGGVVQPGNSLRLSCAASGFTFSSFGMSWVRQAPGKGLEWVSSISGSGSDTLYADSVKGRFTISRDNAKTTLYLQMNSLRPEDTALYYCTIGGSLSRSSQGTLVTVSSAA

SEQ ID NO: 2410 - protein, 118 aa, synthetic construct
EVQLVESGGGVVQPGNSLRLSCAASGFTFSSFGMSWVRQAPGKGLEWVSSISGSGSDTLYADSVKGRFTISRDNAKTTLYLQMNSLRPEDTALYYCTIGGSLSRSSQGTLVTVSSAAA

SEQ ID NO: 2411 - protein, 116 aa, synthetic construct
EVQLVESGGGVVQPGNSLRLSCAASGFTFSSFGMSWVRQAPGKGLEWVSSISGSGSDTLYADSVKGRFTISRDNAKTTLYLQMNSLRPEDTALYYCTIGGSLSRSSQGTLVTVSSG

SEQ ID NO: 2412 - protein, 117 aa, synthetic construct
EVQLVESGGGVVQPGNSLRLSCAASGFTFSSFGMSWVRQAPGKGLEWVSSISGSGSDTLYADSVKGRFTISRDNAKTTLYLQMNSLRPEDTALYYCTIGGSLSRSSQGTLVTVSSGG

SEQ ID NO: 2413 - protein, 118 aa, synthetic construct
EVQLVESGGGVVQPGNSLRLSCAASGFTFSSFGMSWVRQAPGKGLEWVSSISGSGSDTLYADSVKGRFTISRDNAKTTLYLQMNSLRPEDTALYYCTIGGSLSRSSQGTLVTVSSGGG

SEQ ID NO: 2414 - protein, 116 aa, synthetic construct
EVQLVESGGGVVQPGGSLRLSCAASGFTFRSFGMSWVRQAPGKGPEWVSSISGSGSDTLYADSVKGRFTISRDNSKNTLYLQMNSLRPEDTALYYCTIGGSLSRSSQGTLVTVSSA

SEQ ID NO: 2415 - protein, 123 aa, synthetic construct
EVQLVESGGGVVQPGGSLRLSCAASGLTFSSYAMGWFRQAPGKERERVVSISRGGGYTYYADSVKGRFTISRDNSENTVYLQMNSLRPEDTALYYCAAARYWATGSEYEFDYWGQGTLVTVSS

SEQ ID NO: 2416 - protein, 115 aa, synthetic construct
EVQLVESGGGVVQPGGSLRLSCAASGFTFRSFGMSWVRQAPGKGPEWVSSISGSGSDTLYADSVKGRFTISRDNSKNTLYLQMNSLRPEDTALYYCTIGGSLSRSSQGTLVTVSS

SEQ ID NO: 2417-2418 - skipped (2 entries)

SEQ ID NO: 2419 - protein, 5 aa, synthetic construct
GGGGS

SEQ ID NO: 2420 - protein, 7 aa, synthetic construct
SGGSGGS

SEQ ID NO: 2421 - protein, 8 aa, synthetic construct
GGGGSGGS

SEQ ID NO: 2422 - protein, 9 aa, synthetic construct
GGGGSGGGS

SEQ ID NO: 2423 - protein, 10 aa, synthetic construct
GGGGSGGGGS

SEQ ID NO: 2424 - protein, 15 aa, synthetic construct
GGGGSGGGGSGGGGS

SEQ ID NO: 2425 - protein, 18 aa, synthetic construct
GGGGSGGGGSGGGGSGGS

SEQ ID NO: 2426 - protein, 20 aa, synthetic construct
GGGGSGGGGSGGGGSGGGGS

SEQ ID NO: 2427 - protein, 25 aa, synthetic construct
GGGGSGGGGSGGGGSGGGGSGGGGS

SEQ ID NO: 2428 - protein, 30 aa, synthetic construct
GGGGSGGGGSGGGGSGGGGSGGGGSGGGGS

SEQ ID NO: 2429 - protein, 35 aa, synthetic construct
GGGGSGGGGSGGGGSGGGGSGGGGSGGGGSGGGGS

SEQ ID NO: 2430 - protein, 40 aa, synthetic construct
GGGGSGGGGSGGGGSGGGGSGGGGSGGGGSGGGGSGGGGS

SEQ ID NO: 2431 - protein, 15 aa, synthetic construct
EPKSCDKTHTCPPCP

SEQ ID NO: 2432 - protein, 24 aa, synthetic construct
GGGGSGGGSEPKSCDKTHTCPPCP

SEQ ID NO: 2433 - protein, 12 aa, synthetic construct
EPKTPKPQPAAA

SEQ ID NO: 2434 - protein, 62 aa, synthetic construct
ELKTPLGDTTHTCPRCPEPKSCDTPPPCPRCPEPKSCDTPPPCPRCPEPKSCDTPPPCPRCP

SEQ ID NO: 2435 - protein, 25 aa, synthetic construct
EVQLVESGGGVVQPGGSLRLSCAAS

SEQ ID NO: 2436 - protein, 10 aa, synthetic construct
GFTFRSFGMS

SEQ ID NO: 2437 - protein, 14 aa, synthetic construct
WVRQAPGKGPEWVS

SEQ ID NO: 2438 - protein, 10 aa, synthetic construct
SISGSGSDTL

SEQ ID NO: 2439 - protein, 39 aa, synthetic construct
YADSVKGRFTISRDNSKNTLYLQMNSLRPEDTALYYCTI

SEQ ID NO: 2440 - protein, 6 aa, synthetic construct
GGSLSR

SEQ ID NO: 2441 - skipped

SEQ ID NO: 2442 - protein, 11 aa, synthetic construct
WCQGTLVTVSS

SEQ ID NO: 2443 - protein, 11 aa, synthetic construct
CGQGTLVTVSS

SEQ ID NO: 2444 - protein, 25 aa, synthetic construct
DVQLVESGGGLVQTGGSLRLSCAAS

SEQ ID NO: 2445 - protein, 25 aa, synthetic construct
EVQLVESEGGVVQPGGSLRLSCAAS

SEQ ID NO: 2446 - protein, 25 aa, synthetic construct
EVQLVESGGGLVQTGGSLRLSCAAS

SEQ ID NO: 2447 - protein, 25 aa, synthetic construct
EVQLVESGGGVVQLGGSLRLSCAAS

SEQ ID NO: 2448 - protein, 25 aa, synthetic construct
EVQLVESGGGVVQPGGSLRLSCSAS

SEQ ID NO: 2449 - protein, 25 aa, synthetic construct
EVQLVESGGGVVQPGGSLRLSCTAS

SEQ ID NO: 2450 - protein, 10 aa, synthetic construct
ARMHSINAMA

SEQ ID NO: 2451 - protein, 10 aa, synthetic construct
LISWGNGITY

SEQ ID NO: 2452 - skipped

SEQ ID NO: 2453 - protein, 10 aa, synthetic construct
DRMHSINAMA

SEQ ID NO: 2454 - protein, 10 aa, synthetic construct
EMMHSINAMA

SEQ ID NO: 2455 - protein, 10 aa, synthetic construct
ERMHSINAMA

SEQ ID NO: 2456 - protein, 10 aa, synthetic construct
FRMHSINAMA

SEQ ID NO: 2457 - protein, 10 aa, synthetic construct
GAMHSINAMA

SEQ ID NO: 2458 - protein, 10 aa, synthetic construct
GDMHSINAMA

SEQ ID NO: 2459 - protein, 10 aa, synthetic construct
GFMHSINAMA

SEQ ID NO: 2460 - protein, 10 aa, synthetic construct
GHMHSINAMA

SEQ ID NO: 2461 - protein, 10 aa, synthetic construct
GGMHSINAMA

SEQ ID NO: 2462 - protein, 10 aa, synthetic construct
GKMHSINAMA

SEQ ID NO: 2463 - protein, 10 aa, synthetic construct
GIMHSINAMA

SEQ ID NO: 2464 - protein, 10 aa, synthetic construct
GLMHSINAMA

SEQ ID NO: 2465 - protein, 10 aa, synthetic construct
GPMHSINAMA

SEQ ID NO: 2466 - protein, 10 aa, synthetic construct
GQMHSINAMA

SEQ ID NO: 2467 - protein, 10 aa, synthetic construct
GRAHSINAMA

SEQ ID NO: 2468 - protein, 10 aa, synthetic construct
GRDHSINAMA

SEQ ID NO: 2469 - protein, 10 aa, synthetic construct
GREHSINAMA

SEQ ID NO: 2470 - protein, 10 aa, synthetic construct
GRFHSINAMA

SEQ ID NO: 2471 - protein, 10 aa, synthetic construct
GRIHSINAMA

SEQ ID NO: 2472 - protein, 10 aa, synthetic construct
GRKHSINAMA

SEQ ID NO: 2473 - protein, 10 aa, synthetic construct
GRGHSINAMA

SEQ ID NO: 2474 - protein, 10 aa, synthetic construct
GRMFSINAMA

SEQ ID NO: 2475 - protein, 10 aa, synthetic construct
GRMDSINAMA

SEQ ID NO: 2476 - protein, 10 aa, synthetic construct
GRMESINAMA

SEQ ID NO: 2477 - protein, 10 aa, synthetic construct
GRMASINAMA

SEQ ID NO: 2478 - protein, 10 aa, synthetic construct
GRMHDINAMA

SEQ ID NO: 2479 - protein, 10 aa, synthetic construct
GRMHEINAMA

SEQ ID NO: 2480 - protein, 10 aa, synthetic construct
GRMGSINAMA

SEQ ID NO: 2481 - protein, 10 aa, synthetic construct
GRMHFINAMA

SEQ ID NO: 2482 - protein, 10 aa, synthetic construct
GRMHGINAMA

SEQ ID NO: 2483 - protein, 10 aa, synthetic construct
GRMHHINAMA

SEQ ID NO: 2484 - protein, 10 aa, synthetic construct
GRMHIINAMA

SEQ ID NO: 2485 - protein, 10 aa, synthetic construct
GRMHLINAMA

SEQ ID NO: 2486 - protein, 10 aa, synthetic construct
GRMHKINAMA

SEQ ID NO: 2487 - protein, 10 aa, synthetic construct
GRMHPINAMA

SEQ ID NO: 2488 - protein, 10 aa, synthetic construct
GRMHSFNAMA

SEQ ID NO: 2489 - protein, 10 aa, synthetic construct
GRMHSDNAMA

SEQ ID NO: 2490 - protein, 10 aa, synthetic construct
GRMHSENAMA

SEQ ID NO: 2491 - protein, 10 aa, synthetic construct
GRMHSIEAMA

SEQ ID NO: 2492 - protein, 10 aa, synthetic construct
GRMHSGNAMA

SEQ ID NO: 2493 - protein, 10 aa, synthetic construct
GRMHSIFAMA

SEQ ID NO: 2494 - protein, 10 aa, synthetic construct
GRMHSIGAMA

SEQ ID NO: 2495 - protein, 10 aa, synthetic construct
GRMHSILAMA

SEQ ID NO: 2496 - protein, 10 aa, synthetic construct
GRMHSIHAMA

SEQ ID NO: 2497 - protein, 10 aa, synthetic construct
GRMHSIIAMA

SEQ ID NO: 2498 - protein, 10 aa, synthetic construct
GRMHSINAMA

SEQ ID NO: 2499 - protein, 10 aa, synthetic construct
GRMHSINAMH

SEQ ID NO: 2500 - protein, 10 aa, synthetic construct
GRMHSINAMD

SEQ ID NO: 2501 - protein, 10 aa, synthetic construct
GRMHSINAMG

SEQ ID NO: 2502 - protein, 10 aa, synthetic construct
GRMHSINAMF

SEQ ID NO: 2503 - protein, 10 aa, synthetic construct
GRMHSINAMK

SEQ ID NO: 2504 - protein, 10 aa, synthetic construct
GRMHSINAML

SEQ ID NO: 2505 - protein, 10 aa, synthetic construct
GRMHSINAMP

SEQ ID NO: 2506 - protein, 10 aa, synthetic construct
GRMHSINAMQ

SEQ ID NO: 2507 - protein, 10 aa, synthetic construct
GRMHSINAMR

SEQ ID NO: 2508 - protein, 10 aa, synthetic construct
GRMHSINAMS

SEQ ID NO: 2509 - protein, 10 aa, synthetic construct
GRMHSINAMT

SEQ ID NO: 2510 - protein, 10 aa, synthetic construct
GRMHSINAMV

SEQ ID NO: 2511 - protein, 10 aa, synthetic construct
GRMHSINEMA

SEQ ID NO: 2512 - protein, 10 aa, synthetic construct
GRMHSINDMA

SEQ ID NO: 2513 - protein, 10 aa, synthetic construct
GRMHSINAMY

SEQ ID NO: 2514 - protein, 10 aa, synthetic construct
GRMHSINGMA

SEQ ID NO: 2515 - protein, 10 aa, synthetic construct
GRMHSINHMA

SEQ ID NO: 2516 - protein, 10 aa, synthetic construct
GRMHSINIMA

SEQ ID NO: 2517 - protein, 10 aa, synthetic construct
GRMHSINLMA

SEQ ID NO: 2518 - protein, 10 aa, synthetic construct
GRMHSINKMA

SEQ ID NO: 2519 - protein, 10 aa, synthetic construct
GRMHSINTMA

SEQ ID NO: 2520 - protein, 10 aa, synthetic construct
GRMHSINSMA

SEQ ID NO: 2521 - protein, 10 aa, synthetic construct
GRMHSIPAMA

SEQ ID NO: 2522 - protein, 10 aa, synthetic construct
GRMHSINVMA

SEQ ID NO: 2523 - protein, 10 aa, synthetic construct
GRMHSINYMA

SEQ ID NO: 2524 - protein, 10 aa, synthetic construct
GRMHSIQAMA

SEQ ID NO: 2525 - protein, 10 aa, synthetic construct
GRMHSIVAMA

SEQ ID NO: 2526 - protein, 10 aa, synthetic construct
GRMHSIYAMA

SEQ ID NO: 2527 - protein, 10 aa, synthetic construct
GRMHSITAMA

SEQ ID NO: 2528 - protein, 10 aa, synthetic construct
GRMHSKNAMA

SEQ ID NO: 2529 - protein, 10 aa, synthetic construct
GRMHSQNAMA

SEQ ID NO: 2530 - protein, 10 aa, synthetic construct
GRMHSRNAMA

SEQ ID NO: 2531 - protein, 10 aa, synthetic construct
GRMHSPNAMA

SEQ ID NO: 2532 - protein, 10 aa, synthetic construct
GRMHSLNAMA

SEQ ID NO: 2533 - protein, 10 aa, synthetic construct
GRMHSTNAMA

SEQ ID NO: 2534 - protein, 10 aa, synthetic construct
GRMHSSNAMA

SEQ ID NO: 2535 - protein, 10 aa, synthetic construct
GRMHTINAMA

SEQ ID NO: 2536 - protein, 10 aa, synthetic construct
GRMHSVNAMA

SEQ ID NO: 2537 - protein, 10 aa, synthetic construct
GRMHYINAMA

SEQ ID NO: 2538 - protein, 10 aa, synthetic construct
GRMISINAMA

SEQ ID NO: 2539 - protein, 10 aa, synthetic construct
GRMHVINAMA

SEQ ID NO: 2540 - protein, 10 aa, synthetic construct
GRMKSINAMA

SEQ ID NO: 2541 - protein, 10 aa, synthetic construct
GRMLSINAMA

SEQ ID NO: 2542 - protein, 10 aa, synthetic construct
GRMRSINAMA

SEQ ID NO: 2543 - protein, 10 aa, synthetic construct
GRMPSINAMA

SEQ ID NO: 2544 - protein, 10 aa, synthetic construct
GRMQSINAMA

SEQ ID NO: 2545 - protein, 10 aa, synthetic construct
GRMVSINAMA

SEQ ID NO: 2546 - protein, 10 aa, synthetic construct
GRMYSINAMA

SEQ ID NO: 2547 - protein, 10 aa, synthetic construct
GRMSSINAMA

SEQ ID NO: 2548 - protein, 10 aa, synthetic construct
GRMTSINAMA

SEQ ID NO: 2549 - protein, 10 aa, synthetic construct
GRRHSINAMA

SEQ ID NO: 2550 - protein, 10 aa, synthetic construct
GRSHSINAMA

SEQ ID NO: 2551 - protein, 10 aa, synthetic construct
GRTHSINAMA

SEQ ID NO: 2552 - protein, 10 aa, synthetic construct
GRVHSINAMA

SEQ ID NO: 2553 - protein, 10 aa, synthetic construct
GYMHSINAMA

SEQ ID NO: 2554 - protein, 10 aa, synthetic construct
GVMHSINAMA

SEQ ID NO: 2555 - protein, 10 aa, synthetic construct
GRYHSINAMA

SEQ ID NO: 2556 - protein, 10 aa, synthetic construct
HRMHSINAMA

SEQ ID NO: 2557 - protein, 10 aa, synthetic construct
IRMHSINAMA

SEQ ID NO: 2558 - protein, 10 aa, synthetic construct
KRMHSINAMA

SEQ ID NO: 2559 - protein, 10 aa, synthetic construct
SRMHSINAMA

SEQ ID NO: 2560 - protein, 10 aa, synthetic construct
TRMHSINAMA

SEQ ID NO: 2561 - protein, 10 aa, synthetic construct
VRMHSINAMA

SEQ ID NO: 2562 - protein, 10 aa, synthetic construct
EISWGNGITY

SEQ ID NO: 2563 - protein, 10 aa, synthetic construct
AISWGNGITY

SEQ ID NO: 2564 - protein, 10 aa, synthetic construct
FISWGNGITY

SEQ ID NO: 2565 - protein, 10 aa, synthetic construct
HISWGNGITY

SEQ ID NO: 2566 - protein, 10 aa, synthetic construct
GISWGNGITY

SEQ ID NO: 2567 - protein, 10 aa, synthetic construct
GISWGFGITY

SEQ ID NO: 2568 - protein, 10 aa, synthetic construct
LDSWGNGITY

SEQ ID NO: 2569 - protein, 10 aa, synthetic construct
IISWGNGITY

SEQ ID NO: 2570 - protein, 10 aa, synthetic construct
KISWGNGITY

SEQ ID NO: 2571 - protein, 10 aa, synthetic construct
LASWGNGITY

SEQ ID NO: 2572 - protein, 10 aa, synthetic construct
LGSWGNGITY

SEQ ID NO: 2573 - protein, 10 aa, synthetic construct
LIDWGNGITY

SEQ ID NO: 2574 - protein, 10 aa, synthetic construct
LIAWGNGITY

SEQ ID NO: 2575 - protein, 10 aa, synthetic construct
LHSWGNGITY

SEQ ID NO: 2576 - protein, 10 aa, synthetic construct
LIHWGFGITY

SEQ ID NO: 2577 - protein, 10 aa, synthetic construct
LIGWGNGITY

SEQ ID NO: 2578 - protein, 10 aa, synthetic construct
LIEWGNGITY

SEQ ID NO: 2579 - protein, 10 aa, synthetic construct
LIFWGNGITY

SEQ ID NO: 2580 - protein, 10 aa, synthetic construct
LIKWGNGITY

SEQ ID NO: 2581 - protein, 10 aa, synthetic construct
LIIWGNGITY

SEQ ID NO: 2582 - protein, 10 aa, synthetic construct
LIHWGNGITY

SEQ ID NO: 2583 - protein, 10 aa, synthetic construct
LIKLGNGITY

SEQ ID NO: 2584 - protein, 10 aa, synthetic construct
LIRWGNGITY

SEQ ID NO: 2585 - protein, 10 aa, synthetic construct
LIPWGNGITY

SEQ ID NO: 2586 - protein, 10 aa, synthetic construct
LIQWGNGITY

SEQ ID NO: 2587 - protein, 10 aa, synthetic construct
LILWGNGITY

SEQ ID NO: 2588 - protein, 10 aa, synthetic construct
LISGGNGITY

SEQ ID NO: 2589 - protein, 10 aa, synthetic construct
LISFGNGITY

SEQ ID NO: 2590 - protein, 10 aa, synthetic construct
LISAGNGITY

SEQ ID NO: 2591 - protein, 10 aa, synthetic construct
LISEGNGITY

SEQ ID NO: 2592 - protein, 10 aa, synthetic construct
LISDGNGITY

SEQ ID NO: 2593 - protein, 10 aa, synthetic construct
LISKGNGITY

SEQ ID NO: 2594 - protein, 10 aa, synthetic construct
LISPGNGITY

SEQ ID NO: 2595 - protein, 10 aa, synthetic construct
LISLGNGITY

SEQ ID NO: 2596 - protein, 10 aa, synthetic construct
LPSWGNGITY

SEQ ID NO: 2597 - protein, 10 aa, synthetic construct
LISHGNGITY

SEQ ID NO: 2598 - protein, 10 aa, synthetic construct
LISSGNGITY

SEQ ID NO: 2599 - protein, 10 aa, synthetic construct
LISWANGITY

SEQ ID NO: 2600 - protein, 10 aa, synthetic construct
LISRGNGITY

SEQ ID NO: 2601 - protein, 10 aa, synthetic construct
LISTGNGITY

SEQ ID NO: 2602 - protein, 10 aa, synthetic construct
LISQGNGITY

SEQ ID NO: 2603 - protein, 10 aa, synthetic construct
LISVGNGITY

SEQ ID NO: 2604 - protein, 10 aa, synthetic construct
LISWFNGITY

SEQ ID NO: 2605 - protein, 10 aa, synthetic construct
LISWGDGITY

SEQ ID NO: 2606 - protein, 10 aa, synthetic construct
LISWGAGITY

SEQ ID NO: 2607 - skipped

SEQ ID NO: 2608 - protein, 10 aa, synthetic construct
LISWGFGITH

SEQ ID NO: 2609 - protein, 10 aa, synthetic construct
LISIGNGITY

SEQ ID NO: 2610 - protein, 10 aa, synthetic construct
LISWGHGITY

SEQ ID NO: 2611 - protein, 10 aa, synthetic construct
LISWGLGITY

SEQ ID NO: 2612 - protein, 10 aa, synthetic construct
LISWGGGITY

SEQ ID NO: 2613 - protein, 10 aa, synthetic construct
LISWGIGITY

SEQ ID NO: 2614 - protein, 10 aa, synthetic construct
LISWGNFITY

SEQ ID NO: 2615 - protein, 10 aa, synthetic construct
LISWGNEITY

SEQ ID NO: 2616 - protein, 10 aa, synthetic construct
LISWGNDITY

SEQ ID NO: 2617 - protein, 10 aa, synthetic construct
LISWGNAITY

SEQ ID NO: 2618 - protein, 10 aa, synthetic construct
LISWGNGATY

SEQ ID NO: 2619 - protein, 10 aa, synthetic construct
LQSWGNGITY

SEQ ID NO: 2620 - protein, 10 aa, synthetic construct
LISWGNGGTY

SEQ ID NO: 2621 - protein, 10 aa, synthetic construct
LISWGNGFTY

SEQ ID NO: 2622 - protein, 10 aa, synthetic construct
LISWGNGETY

SEQ ID NO: 2623 - protein, 10 aa, synthetic construct
LISWGNGIEY

SEQ ID NO: 2624 - protein, 10 aa, synthetic construct
LISWGNGIAY

SEQ ID NO: 2625 - protein, 10 aa, synthetic construct
LISWGNGHTY

SEQ ID NO: 2626 - protein, 10 aa, synthetic construct
LISWGNGIDY

SEQ ID NO: 2627 - protein, 10 aa, synthetic construct
LISWGNGIGY

SEQ ID NO: 2628 - protein, 10 aa, synthetic construct
LISWGNGIFY

SEQ ID NO: 2629 - protein, 10 aa, synthetic construct
LISWGNGIKY

SEQ ID NO: 2630 - protein, 10 aa, synthetic construct
LISWGNGIPY

SEQ ID NO: 2631 - protein, 10 aa, synthetic construct
LISWGNGIQY

SEQ ID NO: 2632 - protein, 10 aa, synthetic construct
LISWGNGIIY

SEQ ID NO: 2633 - protein, 10 aa, synthetic construct
LISWGNGISY

SEQ ID NO: 2634 - protein, 10 aa, synthetic construct
LISWGNGILY

SEQ ID NO: 2635 - protein, 10 aa, synthetic construct
LISWGNGITA

SEQ ID NO: 2636 - protein, 10 aa, synthetic construct
LISWGNGITG

SEQ ID NO: 2637 - protein, 10 aa, synthetic construct
LISWGNGITH

SEQ ID NO: 2638 - protein, 10 aa, synthetic construct
LISWGNGITD

SEQ ID NO: 2639 - protein, 10 aa, synthetic construct
LISWGNGITE

SEQ ID NO: 2640 - protein, 10 aa, synthetic construct
LISWGNGITF

SEQ ID NO: 2641 - protein, 10 aa, synthetic construct
LISWGNGITI

SEQ ID NO: 2642 - protein, 10 aa, synthetic construct
LISWGNGITP

SEQ ID NO: 2643 - protein, 10 aa, synthetic construct
LISWGNGITR

SEQ ID NO: 2644 - protein, 10 aa, synthetic construct
LISWGNGITQ

SEQ ID NO: 2645 - protein, 10 aa, synthetic construct
LISWGNGITL

SEQ ID NO: 2646 - protein, 10 aa, synthetic construct
LISWGNGITK

SEQ ID NO: 2647 - protein, 10 aa, synthetic construct
LISWGNGITT

SEQ ID NO: 2648 - protein, 10 aa, synthetic construct
LISWGNGITS

SEQ ID NO: 2649 - protein, 10 aa, synthetic construct
LISWGNGITV

SEQ ID NO: 2650 - skipped

SEQ ID NO: 2651 - protein, 10 aa, synthetic construct
LISWGEGITY

SEQ ID NO: 2652 - protein, 10 aa, synthetic construct
LISWGFGITY

SEQ ID NO: 2653 - protein, 10 aa, synthetic construct
LISWGNGIVY

SEQ ID NO: 2654 - protein, 10 aa, synthetic construct
LISWGNGDTY

SEQ ID NO: 2655 - protein, 10 aa, synthetic construct
LISWGNGIYY

SEQ ID NO: 2656 - protein, 10 aa, synthetic construct
LISWGNGKTY

SEQ ID NO: 2657 - protein, 10 aa, synthetic construct
LISWGNGPTY

SEQ ID NO: 2658 - protein, 10 aa, synthetic construct
LISWGNGLTY

SEQ ID NO: 2659 - protein, 10 aa, synthetic construct
LISWGNGTTY

SEQ ID NO: 2660 - protein, 10 aa, synthetic construct
LISWGNGSTY

SEQ ID NO: 2661 - protein, 10 aa, synthetic construct
LISWGNGQTY

SEQ ID NO: 2662 - protein, 10 aa, synthetic construct
LISWGNGRTY

SEQ ID NO: 2663 - protein, 10 aa, synthetic construct
LISWGNIITY

SEQ ID NO: 2664 - protein, 10 aa, synthetic construct
LISWGNHITY

SEQ ID NO: 2665 - protein, 10 aa, synthetic construct
LISWGNGYTY

SEQ ID NO: 2666 - protein, 10 aa, synthetic construct
LISWGNGVTY

SEQ ID NO: 2667 - protein, 10 aa, synthetic construct
LISWGNLITY

SEQ ID NO: 2668 - protein, 10 aa, synthetic construct
LISWGNRITY

SEQ ID NO: 2669 - protein, 10 aa, synthetic construct
LISWGNQITY

SEQ ID NO: 2670 - protein, 10 aa, synthetic construct
LISWGNPITY

SEQ ID NO: 2671 - protein, 10 aa, synthetic construct
LISWGNSITY

SEQ ID NO: 2672 - protein, 10 aa, synthetic construct
LISWGQGITY

SEQ ID NO: 2673 - protein, 10 aa, synthetic construct
LISWGNVITY

SEQ ID NO: 2674 - protein, 10 aa, synthetic construct
LKSWGNGITY

SEQ ID NO: 2675 - protein, 10 aa, synthetic construct
LISWGNTITY

SEQ ID NO: 2676 - protein, 10 aa, synthetic construct
LISWGRGITY

SEQ ID NO: 2677 - protein, 10 aa, synthetic construct
LISWGSGITY

SEQ ID NO: 2678 - protein, 10 aa, synthetic construct
LISWGTGITY

SEQ ID NO: 2679 - protein, 10 aa, synthetic construct
LISWGVGITY

SEQ ID NO: 2680 - protein, 10 aa, synthetic construct
LISWGYGITY

SEQ ID NO: 2681 - protein, 10 aa, synthetic construct
LISWLNGITY

SEQ ID NO: 2682 - protein, 10 aa, synthetic construct
LISWQNGITY

SEQ ID NO: 2683 - protein, 10 aa, synthetic construct
LISWPNGITY

SEQ ID NO: 2684 - protein, 10 aa, synthetic construct
LISWSNGITY

SEQ ID NO: 2685 - protein, 10 aa, synthetic construct
LISWRNGITY

SEQ ID NO: 2686 - protein, 10 aa, synthetic construct
LISWTNGITY

SEQ ID NO: 2687 - protein, 10 aa, synthetic construct
LISWVNGITY

SEQ ID NO: 2688 - protein, 10 aa, synthetic construct
LITWGNGITY

SEQ ID NO: 2689 - protein, 10 aa, synthetic construct
LISYGNGITY

SEQ ID NO: 2690 - protein, 10 aa, synthetic construct
LISWYNGITY

SEQ ID NO: 2691 - protein, 10 aa, synthetic construct
LIVWGFGITY

SEQ ID NO: 2692 - skipped

SEQ ID NO: 2693 - protein, 10 aa, synthetic construct
LIVWGNGITY

SEQ ID NO: 2694 - protein, 10 aa, synthetic construct
LLSWGNGITY

SEQ ID NO: 2695 - protein, 10 aa, synthetic construct
DISWGNGITY

SEQ ID NO: 2696 - protein, 10 aa, synthetic construct
RISWGFGITY

SEQ ID NO: 2697 - protein, 10 aa, synthetic construct
RISWGNGITY

SEQ ID NO: 2698 - protein, 10 aa, synthetic construct
VISWGNGITY

SEQ ID NO: 2699 - protein, 10 aa, synthetic construct
TISWGNGITY

SEQ ID NO: 2700 - protein, 10 aa, synthetic construct
SISWGNGITY

SEQ ID NO: 2701 - protein, 10 aa, synthetic construct
LYSWGNGITY

SEQ ID NO: 2702 - protein, 10 aa, synthetic construct
LSSWGNGITY

SEQ ID NO: 2703 - protein, 10 aa, synthetic construct
LRSWGNGITY

SEQ ID NO: 2704 - protein, 10 aa, synthetic construct
LTSWGNGITY

SEQ ID NO: 2705 - protein, 10 aa, synthetic construct
QISWGNGITY

SEQ ID NO: 2706 - protein, 10 aa, synthetic construct
PISWGNGITY

SEQ ID NO: 2707 - protein, 10 aa, synthetic construct
DSYGSSWYDS

SEQ ID NO: 2708 - protein, 10 aa, synthetic construct
ASYGSSWYDS

SEQ ID NO: 2709 - protein, 10 aa, synthetic construct
EAYGSSWYDS

SEQ ID NO: 2710 - protein, 10 aa, synthetic construct
EFYGSSWYDS

SEQ ID NO: 2711 - protein, 10 aa, synthetic construct
EEYGSSWYDS

SEQ ID NO: 2712 - protein, 10 aa, synthetic construct
EDYGSSWYDS

SEQ ID NO: 2713 - protein, 10 aa, synthetic construct
EHYGSSWYDS

SEQ ID NO: 2714 - protein, 10 aa, synthetic construct
EGYGSSWYDS

SEQ ID NO: 2715 - protein, 10 aa, synthetic construct
EIYGSSWYDS

SEQ ID NO: 2716 - protein, 10 aa, synthetic construct
EKYGSSWYDS

SEQ ID NO: 2717 - protein, 10 aa, synthetic construct
ELYGSSWYDS

SEQ ID NO: 2718 - protein, 10 aa, synthetic construct
ERYGSSWYDS

SEQ ID NO: 2719 - protein, 10 aa, synthetic construct
EQYGSSWYDS

SEQ ID NO: 2720 - protein, 10 aa, synthetic construct
EPYGSSWYDS

SEQ ID NO: 2721 - protein, 10 aa, synthetic construct
ESAGSSWYDS

SEQ ID NO: 2722 - protein, 10 aa, synthetic construct
ESDGSSWYDS

SEQ ID NO: 2723 - protein, 10 aa, synthetic construct
ESEGSSWYDS

SEQ ID NO: 2724 - protein, 10 aa, synthetic construct
ESGGSSWYDS

SEQ ID NO: 2725 - protein, 10 aa, synthetic construct
ESFGSSWYDS

SEQ ID NO: 2726 - protein, 10 aa, synthetic construct
ESIGSSWYDS

SEQ ID NO: 2727 - protein, 10 aa, synthetic construct
ESHGSSWYDS

SEQ ID NO: 2728 - protein, 10 aa, synthetic construct
ESKGSSWYDS

SEQ ID NO: 2729 - protein, 10 aa, synthetic construct
ESQGSSWYDS

SEQ ID NO: 2730 - protein, 10 aa, synthetic construct
ESSGSSWYDS

SEQ ID NO: 2731 - protein, 10 aa, synthetic construct
ESTGSSWYDS

SEQ ID NO: 2732 - protein, 10 aa, synthetic construct
ESRGSSWYDS

SEQ ID NO: 2733 - protein, 10 aa, synthetic construct
ESPGSSWYDS

SEQ ID NO: 2734 - protein, 10 aa, synthetic construct
ESVGSSWYDS

SEQ ID NO: 2735 - protein, 10 aa, synthetic construct
ESYASSCYDS

SEQ ID NO: 2736 - protein, 10 aa, synthetic construct
ESYASSWYDS

SEQ ID NO: 2737 - protein, 10 aa, synthetic construct
ESYDSSWYDS

SEQ ID NO: 2738 - protein, 10 aa, synthetic construct
ESYESSWYDS

SEQ ID NO: 2739 - protein, 10 aa, synthetic construct
ESYFSSWYDS

SEQ ID NO: 2740 - protein, 10 aa, synthetic construct
ESYGASWPDS

SEQ ID NO: 2741 - protein, 10 aa, synthetic construct
ESYGASWYDS

SEQ ID NO: 2742 - protein, 10 aa, synthetic construct
ESYGDSWYDS

SEQ ID NO: 2743 - protein, 10 aa, synthetic construct
ESYGESWYDS

SEQ ID NO: 2744 - protein, 10 aa, synthetic construct
ESYGFSWYDS

SEQ ID NO: 2745 - protein, 10 aa, synthetic construct
ESYGGSWYDS

SEQ ID NO: 2746 - protein, 10 aa, synthetic construct
ESYGISWYDS

SEQ ID NO: 2747 - protein, 10 aa, synthetic construct
ESYGKSWYDS

SEQ ID NO: 2748 - protein, 10 aa, synthetic construct
ESYGLSWYDS

SEQ ID NO: 2749 - protein, 10 aa, synthetic construct
ESYGPSWYDS

SEQ ID NO: 2750 - protein, 10 aa, synthetic construct
ESYGQSWYDS

SEQ ID NO: 2751 - protein, 10 aa, synthetic construct
ESYGRSWYDS

SEQ ID NO: 2752 - protein, 10 aa, synthetic construct
ESYGSDWYDS

SEQ ID NO: 2753 - protein, 10 aa, synthetic construct
ESYGSEWYDS

SEQ ID NO: 2754 - protein, 10 aa, synthetic construct
ESYGSGWYDS

SEQ ID NO: 2755 - protein, 10 aa, synthetic construct
ESYGSHWYDS

SEQ ID NO: 2756 - protein, 10 aa, synthetic construct
ESYGSIWYDS

SEQ ID NO: 2757 - protein, 10 aa, synthetic construct
ESYGSKWYDS

SEQ ID NO: 2758 - protein, 10 aa, synthetic construct
ESYGSLWYDS

SEQ ID NO: 2759 - protein, 10 aa, synthetic construct
ESYGSPWYDS

SEQ ID NO: 2760 - protein, 10 aa, synthetic construct
ESYGSQWYDS

SEQ ID NO: 2761 - protein, 10 aa, synthetic construct
ESYGSRWYDS

SEQ ID NO: 2762 - protein, 10 aa, synthetic construct
ESYGSSAYDS

SEQ ID NO: 2763 - protein, 10 aa, synthetic construct
ESYGSSDYDS

SEQ ID NO: 2764 - protein, 10 aa, synthetic construct
ESYGSSEYDS

SEQ ID NO: 2765 - protein, 10 aa, synthetic construct
ESYGSSFYDS

SEQ ID NO: 2766 - protein, 10 aa, synthetic construct
ESYGSSGYDS

SEQ ID NO: 2767 - protein, 10 aa, synthetic construct
ESYGSSHYDS

SEQ ID NO: 2768 - protein, 10 aa, synthetic construct
ESYGSSIYDS

SEQ ID NO: 2769 - protein, 10 aa, synthetic construct
ESYGSSKYDS

SEQ ID NO: 2770 - protein, 10 aa, synthetic construct
ESYGSSLYDS

SEQ ID NO: 2771 - protein, 10 aa, synthetic construct
ESYGSSPYDS

SEQ ID NO: 2772 - protein, 10 aa, synthetic construct
ESYGSSQYDS

SEQ ID NO: 2773 - protein, 10 aa, synthetic construct
ESYGSSRYDS

SEQ ID NO: 2774 - protein, 10 aa, synthetic construct
ESYGSSTYDS

SEQ ID NO: 2775 - protein, 10 aa, synthetic construct
ESYGSSVYDS

SEQ ID NO: 2776 - protein, 10 aa, synthetic construct
ESYGSSWADS

SEQ ID NO: 2777 - protein, 10 aa, synthetic construct
ESYGSSWDDS

SEQ ID NO: 2778 - protein, 10 aa, synthetic construct
ESYGSSWEDS

SEQ ID NO: 2779 - protein, 10 aa, synthetic construct
ESYGSSWFDS

SEQ ID NO: 2780 - protein, 10 aa, synthetic construct
ESYGSSWGDS

SEQ ID NO: 2781 - protein, 10 aa, synthetic construct
ESYGSSWHDS

SEQ ID NO: 2782 - protein, 10 aa, synthetic construct
ESYGSSWIDS

SEQ ID NO: 2783 - protein, 10 aa, synthetic construct
ESYGSSWKDS

SEQ ID NO: 2784 - protein, 10 aa, synthetic construct
ESYGSSWLDS

SEQ ID NO: 2785 - protein, 10 aa, synthetic construct
ESYGSSWPDS

SEQ ID NO: 2786 - protein, 10 aa, synthetic construct
ESYGSSWQDS

SEQ ID NO: 2787 - protein, 10 aa, synthetic construct
ESYGSSWRDS

SEQ ID NO: 2788 - protein, 10 aa, synthetic construct
ESYGSSWSDS

SEQ ID NO: 2789 - protein, 10 aa, synthetic construct
ESYGSSWTDS

SEQ ID NO: 2790 - protein, 10 aa, synthetic construct
ESYGSSWVDS

SEQ ID NO: 2791 - protein, 10 aa, synthetic construct
ESYGSSWYAS

SEQ ID NO: 2792 - protein, 10 aa, synthetic construct
ESYGSSWYDA

SEQ ID NO: 2793 - protein, 10 aa, synthetic construct
ESYGSSWYDD

SEQ ID NO: 2794 - protein, 10 aa, synthetic construct
ESYGSSWYDE

SEQ ID NO: 2795 - protein, 10 aa, synthetic construct
ESYGSSWYDF

SEQ ID NO: 2796 - protein, 10 aa, synthetic construct
ESYGSSWYDG

SEQ ID NO: 2797 - protein, 10 aa, synthetic construct
ESYGSSWYDH

SEQ ID NO: 2798 - protein, 10 aa, synthetic construct
ESYGSSWYDI

SEQ ID NO: 2799 - protein, 10 aa, synthetic construct
ESYGSSWYDK

SEQ ID NO: 2800 - protein, 10 aa, synthetic construct
ESYGSSWYDL

SEQ ID NO: 2801 - protein, 10 aa, synthetic construct
ESYGSSWYDP

SEQ ID NO: 2802 - protein, 10 aa, synthetic construct
ESYGSSWYDQ

SEQ ID NO: 2803 - protein, 10 aa, synthetic construct
ESYGSSWYDR

SEQ ID NO: 2804 - protein, 10 aa, synthetic construct
ESYGSSWYDS

SEQ ID NO: 2805 - protein, 10 aa, synthetic construct
ESYGSSWYDT

SEQ ID NO: 2806 - protein, 10 aa, synthetic construct
ESYGSSWYDV

SEQ ID NO: 2807 - protein, 10 aa, synthetic construct
ESYGSSWYDY

SEQ ID NO: 2808 - protein, 10 aa, synthetic construct
ESYGSSWYES

SEQ ID NO: 2809 - protein, 10 aa, synthetic construct
ESYGSSWYFS

SEQ ID NO: 2810 - protein, 10 aa, synthetic construct
ESYGSSWYGS

SEQ ID NO: 2811 - protein, 10 aa, synthetic construct
ESYGSSWYHS

SEQ ID NO: 2812 - protein, 10 aa, synthetic construct
ESYGSSWYIS

SEQ ID NO: 2813 - protein, 10 aa, synthetic construct
ESYGSSWYKS

SEQ ID NO: 2814 - protein, 10 aa, synthetic construct
ESYGSSWYLS

SEQ ID NO: 2815 - protein, 10 aa, synthetic construct
ESYGSSWYNS

SEQ ID NO: 2816 - protein, 10 aa, synthetic construct
ESYGSSWYRS

SEQ ID NO: 2817 - protein, 10 aa, synthetic construct
ESYGSSWYSS

SEQ ID NO: 2818 - protein, 10 aa, synthetic construct
ESYGSSWYTS

SEQ ID NO: 2819 - protein, 10 aa, synthetic construct
ESYGSSWYVS

SEQ ID NO: 2820 - protein, 10 aa, synthetic construct
ESYGSSWYYS

SEQ ID NO: 2821 - protein, 10 aa, synthetic construct
ESYGSSYYDS

SEQ ID NO: 2822 - protein, 10 aa, synthetic construct
ESYGSTWYDS

SEQ ID NO: 2823 - protein, 10 aa, synthetic construct
ESYGSVWYDS

SEQ ID NO: 2824 - protein, 10 aa, synthetic construct
ESYGTSWYDS

SEQ ID NO: 2825 - protein, 10 aa, synthetic construct
ESYGVSWYDS

SEQ ID NO: 2826 - protein, 10 aa, synthetic construct
ESYGYSWYDS

SEQ ID NO: 2827 - protein, 10 aa, synthetic construct
ESYHASWPDS

SEQ ID NO: 2828 - protein, 10 aa, synthetic construct
ESYHASWYDS

SEQ ID NO: 2829 - protein, 10 aa, synthetic construct
ESYHSSWPDS

SEQ ID NO: 2830 - protein, 10 aa, synthetic construct
ESYHSSWYDS

SEQ ID NO: 2831 - protein, 10 aa, synthetic construct
ESYISSWYDS

SEQ ID NO: 2832 - protein, 10 aa, synthetic construct
ESYKSSWYDS

SEQ ID NO: 2833 - protein, 10 aa, synthetic construct
ESYLSSWYDS

SEQ ID NO: 2834 - protein, 10 aa, synthetic construct
ESYPSSWYDS

SEQ ID NO: 2835 - protein, 10 aa, synthetic construct
ESYRASWPDS

SEQ ID NO: 2836 - protein, 10 aa, synthetic construct
ESYRASWYDS

SEQ ID NO: 2837 - protein, 10 aa, synthetic construct
ESYRSSWPDS

SEQ ID NO: 2838 - protein, 10 aa, synthetic construct
ESYRSSWYDS

SEQ ID NO: 2839 - protein, 10 aa, synthetic construct
ESYSSSWYDS

SEQ ID NO: 2840 - protein, 10 aa, synthetic construct
ESYTSSWYDS

SEQ ID NO: 2841 - protein, 10 aa, synthetic construct
ESYVSSWYDS

SEQ ID NO: 2842 - protein, 10 aa, synthetic construct
ESYYSSWYDS

SEQ ID NO: 2843 - protein, 10 aa, synthetic construct
ETYGSSWYDS

SEQ ID NO: 2844 - protein, 10 aa, synthetic construct
EYYGSSWYDS

SEQ ID NO: 2845 - protein, 10 aa, synthetic construct
FSYGSSWYDS

SEQ ID NO: 2846 - protein, 10 aa, synthetic construct
GSYGSSWYDS

SEQ ID NO: 2847 - protein, 10 aa, synthetic construct
HSYGSSWYDS

SEQ ID NO: 2848 - protein, 10 aa, synthetic construct
ISYGSSWYDS

SEQ ID NO: 2849 - protein, 10 aa, synthetic construct
KSYGSSWYDS

SEQ ID NO: 2850 - protein, 10 aa, synthetic construct
PSYGSSWYDS

SEQ ID NO: 2851 - protein, 10 aa, synthetic construct
QSYGSSWYDS

SEQ ID NO: 2852 - protein, 10 aa, synthetic construct
RSYGSSWYDS

SEQ ID NO: 2853 - protein, 10 aa, synthetic construct
SSYGSSWYDS

SEQ ID NO: 2854 - protein, 10 aa, synthetic construct
TSYGSSWYDS

SEQ ID NO: 2855 - protein, 10 aa, synthetic construct
VSYGSSWYDS

SEQ ID NO: 2856 - protein, 10 aa, synthetic construct
YSYGSSWYDS

SEQ ID NO: 2857 - protein, 119 aa, synthetic construct
DVQLVESGGGVVQPGGSLRLSCAASGRMHSINAMAWFRQVPGKEREFVALISWGNGITYYEDSMKGRFTISRDNAKNTLYLQMNSLRPEDTALYFCAAESYGSSWYDSWGQGTLVTVSS

SEQ ID NO: 2858 - protein, 119 aa, synthetic construct
DVQLVESGGGVVQPGGSLRLSCAASGRMHSINAMAWFRQVPGKEREFVALISWGNGITYYEDSMKGRFTISRDNAKNTVYLQMNSLRPEDTALYFCAAESYGSSWYDSWGQGTLVTVSS

SEQ ID NO: 2859 - protein, 119 aa, synthetic construct
DVQLVESGGGVVQPGGSLRLSCAASGRMHSINAMAWFRQVPGKEREFVALISWGNGITYYEDSMKGRFTISRDNAKNTMYLQMNSLRPEDTALYFCAAESYGSSWYDSWGQGTLVTVSS

SEQ ID NO: 2860 - protein, 119 aa, synthetic construct
EVQLVESGGGVVQPGGSLRLSCAASGRMHSINAMAWFRQVPGKEREFVALISWGNGITYYEDSMKGRFTISRDNAKNTMYLQMNSLRPEDTALYFCAAESYGSSWYDSWGQGTLVTVSS

SEQ ID NO: 2861 - protein, 119 aa, synthetic construct
EVQLVESGGGVVQPGGSLRLSCAASGRMHSINAMAWFRQAPGKEREFVALISWGNGITYYADSVKGRFTISRDNAKNTMYLQMNSLRPEDTALYYCAAESYGSSWYDSWGQGTLVTVSS

SEQ ID NO: 2862 - protein, 119 aa, synthetic construct
EVQLVESGGGVVQPGGSLRLSCAASGRMHSINAMAWFRQAPGKEREFVALISWGNGITYYADSVKGRFTISRDNAKNTMYLQMNSLRPEDTALYFCAAESYGSSWYDSWGQGTLVTVSS

SEQ ID NO: 2863 - protein, 119 aa, synthetic construct
EVQLVESGGGVVQPGGSLRLSCAASGRMHSINAMAWFRQVPGKEREFVALISWGNGITYYADSVKGRFTISRDNAKNTMYLQMNSLRPEDTALYYCAAESYGSSWYDSWGQGTLVTVSS

SEQ ID NO: 2864 - protein, 119 aa, synthetic construct
EVQLVESGGGVVQPGGSLRLSCAASGRMHSINAMAWFRQVPGKEREFVALISWGNGITYYEDSMKGRFTISRDNAKNTMYLQMNSLRPEDTALYYCAAESYGSSWYDSWGQGTLVTVSS

SEQ ID NO: 2865 - protein, 119 aa, synthetic construct
EVQLVESGGGVVQPGGSLRLSCAASGRMHSINAMAWFRQAPGKEREFVALISWGNGITYYEDSMKGRFTISRDNAKNTMYLQMNSLRPEDTALYFCAAESYGSSWYDSWGQGTLVTVSS

SEQ ID NO: 2866 - protein, 119 aa, synthetic construct
EVQLVESGGGVVQPGGSLRLSCAASGRMHSINAMAWFRQAPGKEREFVALISWGNGITYYEDSMKGRFTISRDNAKNTMYLQMNSLRPEDTALYYCAAESYGSSWYDSWGQGTLVTVSS

SEQ ID NO: 2867 - protein, 119 aa, synthetic construct
EVQLVESGGGVVQPGGSLRLSCAASGRMHSINAMAWFRQVPGKEREFVALISWGNGITYYEDSMKGRFTISRDNAKNTLYLQMNSLRPEDTALYFCAAESYGSSWYDSWGQGTLVTVSS

SEQ ID NO: 2868 - protein, 119 aa, synthetic construct
EVQLVESGGGVVQPGGSLRLSCAASGRMHSINAMAWFRQVPGKEREFVALISWGNGITYYADSVKGRFTISRDNAKNTMYLQMNSLRPEDTALYFCAAESYGSSWYDSWGQGTLVTVSS

SEQ ID NO: 2869 - protein, 119 aa, synthetic construct
EVQLVESGGGVVQPGGSLRLSCAASGRMHSINAMAWFRQVPGKEREFVALISWGNGITYYEDSMKGRFTISRDNAKNTVYLQMNSLRPEDTALYFCAAESYGSSWYDSWGQGTLVTVSS

SEQ ID NO: 2870 - protein, 119 aa, synthetic construct
EVQLVESGGGVVQPGGSLRLSCAASGRMHSINAMAWFRQVPGKEREFVALISWGNGITYYADSMKGRFTISRDNAKNTMYLQMNSLRPEDTALYYCAAESYGSSWYDSWGQGTLVTVSS

SEQ ID NO: 2871 - protein, 119 aa, synthetic construct
EVQLVESGGGVVQPGGSLRLSCAASGRMHSINAMAWFRQVPGKEREFVALISWGNGITYYEDSVKGRFTISRDNAKNTMYLQMNSLRPEDTALYYCAAESYGSSWYDSWGQGTLVTVSS

SEQ ID NO: 2872 - protein, 119 aa, synthetic construct
EVQLVESGGGVVQPGGSLRLSCAASGRMHSINAMAWFRQVPGKEREFVALISWGNGITYYEDSMKGRFTISRDNAKNTMSLQMNSLRPEDTALYFCAAESYGSSWYDSWGQGTLVTVSS

SEQ ID NO: 2873 - protein, 119 aa, synthetic construct
EVQLVESGGGVVQPGGSLRLSCAASGRMHSINAMAWFRQAPGKEREFVALISWGNGITYYADSMKGRFTISRDNAKNTMYLQMNSLRPEDTALYFCAAESYGSSWYDSWGQGTLVTVSS

SEQ ID NO: 2874 - protein, 119 aa, synthetic construct
EVQLVESGGGVVQPGGSLRLSCAASGRMHSINAMAWFRQAPGKEREFVALISWGNGITYYADSMKGRFTISRDNAKNTMYLQMNSLRPEDTALYYCAAESYGSSWYDSWGQGTLVTVSS

SEQ ID NO: 2875 - protein, 119 aa, synthetic construct
EVQLVESGGGVVQPGGSLRLSCAASGRMHSINAMAWFRQVPGKEREFVALISWGNGITYYADSMKGRFTISRDNAKNTMYLQMNSLRPEDTALYFCAAESYGSSWYDSWGQGTLVTVSS

SEQ ID NO: 2876 - protein, 119 aa, synthetic construct
EVQLVESGGGVVQPGGSLRLSCAASGRMHSINAMAWFRQVPGKEREFVALISWGNGITYYEDSVKGRFTISRDNAKNTMYLQMNSLRPEDTALYFCAAESYGSSWYDSWGQGTLVTVSS

SEQ ID NO: 2877 - protein, 119 aa, synthetic construct
EVQLVESGGGVVQPGGSLRLSCAASGRMHSINAMAWFRQAPGKEREFVALISWGNGITYYEDSVKGRFTISRDNAKNTMYLQMNSLRPEDTALYFCAAESYGSSWYDSWGQGTLVTVSS

SEQ ID NO: 2878 - protein, 119 aa, synthetic construct
EVQLVESGGGVVQPGGSLRLSCAASGRMHSINAMAWFRQAPGKEREFVALISWGNGITYYEDSVKGRFTISRDNAKNTMYLQMNSLRPEDTALYYCAAESYGSSWYDSWGQGTLVTVSS

SEQ ID NO: 2879 - protein, 119 aa, synthetic construct
EVQLVESGGGVVQPGGSLRLSCAASGRMHSINAMAWFRQVPGKEREFVALISWGNGITYYEDSMKGRFTISRDNAKNTMDLQMNSLRPEDTALYFCAAESYGSSWYDSWGQGTLVTVSS

SEQ ID NO: 2880 - protein, 119 aa, synthetic construct
EVQLVESGGGVVQPGGSLRLSCAASDRMHSINAMAWFRQVPGKEREFVALISWGNGITYYEDSMKGRFTISRDNAKNTMYLQMNSLRPEDTALYFCAAESYGSSWYDSWGQGTLVTVSS

SEQ ID NO: 2881 - protein, 119 aa, synthetic construct
EVQLVESGGGVVQPGGSLRLSCAASFRMHSINAMAWFRQVPGKEREFVALISWGNGITYYEDSMKGRFTISRDNAKNTMYLQMNSLRPEDTALYFCAAESYGSSWYDSWGQGTLVTVSS

SEQ ID NO: 2882 - protein, 119 aa, synthetic construct
EVQLVESGGGVVQPGGSLRLSCAASSRMHSINAMAWFRQVPGKEREFVALISWGNGITYYEDSMKGRFTISRDNAKNTMYLQMNSLRPEDTALYFCAAESYGSSWYDSWGQGTLVTVSS

SEQ ID NO: 2883 - protein, 119 aa, synthetic construct
EVQLVESGGGVVQPGGSLRLSCAASRRMHSINAMAWFRQVPGKEREFVALISWGNGITYYEDSMKGRFTISRDNAKNTMYLQMNSLRPEDTALYFCAAESYGSSWYDSWGQGTLVTVSS

SEQ ID NO: 2884 - protein, 119 aa, synthetic construct
EVQLVESGGGVVQPGGSLRLSCAASERMHSINAMAWFRQVPGKEREFVALISWGNGITYYEDSMKGRFTISRDNAKNTMYLQMNSLRPEDTALYFCAAESYGSSWYDSWGQGTLVTVSS

SEQ ID NO: 2885 - protein, 119 aa, synthetic construct
EVQLVESGGGVVQPGGSLRLSCAASHRMHSINAMAWFRQVPGKEREFVALISWGNGITYYEDSMKGRFTISRDNAKNTMYLQMNSLRPEDTALYFCAAESYGSSWYDSWGQGTLVTVSS

SEQ ID NO: 2886 - protein, 119 aa, synthetic construct
EVQLVESGGGVVQPGGSLRLSCAASTRMHSINAMAWFRQVPGKEREFVALISWGNGITYYEDSMKGRFTISRDNAKNTMYLQMNSLRPEDTALYFCAAESYGSSWYDSWGQGTLVTVSS

SEQ ID NO: 2887 - protein, 119 aa, synthetic construct
EVQLVESGGGVVQPGGSLRLSCAASIRMHSINAMAWFRQVPGKEREFVALISWGNGITYYEDSMKGRFTISRDNAKNTMYLQMNSLRPEDTALYFCAAESYGSSWYDSWGQGTLVTVSS

SEQ ID NO: 2888 - protein, 119 aa, synthetic construct
EVQLVESGGGVVQPGGSLRLSCAASARMHSINAMAWFRQVPGKEREFVALISWGNGITYYEDSMKGRFTISRDNAKNTMYLQMNSLRPEDTALYFCAAESYGSSWYDSWGQGTLVTVSS

SEQ ID NO: 2889 - protein, 119 aa, synthetic construct
EVQLVESGGGVVQPGGSLRLSCAASVRMHSINAMAWFRQVPGKEREFVALISWGNGITYYEDSMKGRFTISRDNAKNTMYLQMNSLRPEDTALYFCAAESYGSSWYDSWGQGTLVTVSS

SEQ ID NO: 2890 - protein, 119 aa, synthetic construct
EVQLVESGGGVVQPGGSLRLSCAASEMMHSINAMAWFRQVPGKEREFVALISWGNGITYYEDSMKGRFTISRDNAKNTMYLQMNSLRPEDTALYFCAAESYGSSWYDSWGQGTLVTVSS

SEQ ID NO: 2891 - protein, 119 aa, synthetic construct
EVQLVESGGGVVQPGGSLRLSCAASKRMHSINAMAWFRQVPGKEREFVALISWGNGITYYEDSMKGRFTISRDNAKNTMYLQMNSLRPEDTALYFCAAESYGSSWYDSWGQGTLVTVSS

SEQ ID NO: 2892 - protein, 119 aa, synthetic construct
EVQLVESGGGVVQPGGSLRLSCAASGDMHSINAMAWFRQVPGKEREFVALISWGNGITYYEDSMKGRFTISRDNAKNTMYLQMNSLRPEDTALYFCAAESYGSSWYDSWGQGTLVTVSS

SEQ ID NO: 2893 - protein, 119 aa, synthetic construct
EVQLVESGGGVVQPGGSLRLSCAASGHMHSINAMAWFRQVPGKEREFVALISWGNGITYYEDSMKGRFTISRDNAKNTMYLQMNSLRPEDTALYFCAAESYGSSWYDSWGQGTLVTVSS

SEQ ID NO: 2894 - protein, 119 aa, synthetic construct
EVQLVESGGGVVQPGGSLRLSCAASGYMHSINAMAWFRQVPGKEREFVALISWGNGITYYEDSMKGRFTISRDNAKNTMYLQMNSLRPEDTALYFCAAESYGSSWYDSWGQGTLVTVSS

SEQ ID NO: 2895 - protein, 119 aa, synthetic construct
EVQLVESGGGVVQPGGSLRLSCAASGFMHSINAMAWFRQVPGKEREFVALISWGNGITYYEDSMKGRFTISRDNAKNTMYLQMNSLRPEDTALYFCAAESYGSSWYDSWGQGTLVTVSS

SEQ ID NO: 2896 - protein, 119 aa, synthetic construct
EVQLVESGGGVVQPGGSLRLSCAASGVMHSINAMAWFRQVPGKEREFVALISWGNGITYYEDSMKGRFTISRDNAKNTMYLQMNSLRPEDTALYFCAAESYGSSWYDSWGQGTLVTVSS

SEQ ID NO: 2897 - protein, 119 aa, synthetic construct
EVQLVESGGGVVQPGGSLRLSCAASGLMHSINAMAWFRQVPGKEREFVALISWGNGITYYEDSMKGRFTISRDNAKNTMYLQMNSLRPEDTALYFCAAESYGSSWYDSWGQGTLVTVSS

SEQ ID NO: 2898 - protein, 119 aa, synthetic construct
EVQLVESGGGVVQPGGSLRLSCAASGQMHSINAMAWFRQVPGKEREFVALISWGNGITYYEDSMKGRFTISRDNAKNTMYLQMNSLRPEDTALYFCAAESYGSSWYDSWGQGTLVTVSS

SEQ ID NO: 2899 - protein, 119 aa, synthetic construct
EVQLVESGGGVVQPGGSLRLSCAASGKMHSINAMAWFRQVPGKEREFVALISWGNGITYYEDSMKGRFTISRDNAKNTMYLQMNSLRPEDTALYFCAAESYGSSWYDSWGQGTLVTVSS

SEQ ID NO: 2900 - protein, 119 aa, synthetic construct
EVQLVESGGGVVQPGGSLRLSCAASGPMHSINAMAWFRQVPGKEREFVALISWGNGITYYEDSMKGRFTISRDNAKNTMYLQMNSLRPEDTALYFCAAESYGSSWYDSWGQGTLVTVSS

SEQ ID NO: 2901 - protein, 119 aa, synthetic construct
EVQLVESGGGVVQPGGSLRLSCAASGAMHSINAMAWFRQVPGKEREFVALISWGNGITYYEDSMKGRFTISRDNAKNTMYLQMNSLRPEDTALYFCAAESYGSSWYDSWGQGTLVTVSS

SEQ ID NO: 2902 - protein, 119 aa, synthetic construct
EVQLVESGGGVVQPGGSLRLSCAASGIMHSINAMAWFRQVPGKEREFVALISWGNGITYYEDSMKGRFTISRDNAKNTMYLQMNSLRPEDTALYFCAAESYGSSWYDSWGQGTLVTVSS

SEQ ID NO: 2903 - protein, 119 aa, synthetic construct
EVQLVESGGGVVQPGGSLRLSCAASGGMHSINAMAWFRQVPGKEREFVALISWGNGITYYEDSMKGRFTISRDNAKNTMYLQMNSLRPEDTALYFCAAESYGSSWYDSWGQGTLVTVSS

SEQ ID NO: 2904 - protein, 119 aa, synthetic construct
EVQLVESGGGVVQPGGSLRLSCAASGRFHSINAMAWFRQVPGKEREFVALISWGNGITYYEDSMKGRFTISRDNAKNTMYLQMNSLRPEDTALYFCAAESYGSSWYDSWGQGTLVTVSS

SEQ ID NO: 2905 - protein, 119 aa, synthetic construct
EVQLVESGGGVVQPGGSLRLSCAASGRRHSINAMAWFRQVPGKEREFVALISWGNGITYYEDSMKGRFTISRDNAKNTMYLQMNSLRPEDTALYFCAAESYGSSWYDSWGQGTLVTVSS

SEQ ID NO: 2906 - protein, 119 aa, synthetic construct
EVQLVESGGGVVQPGGSLRLSCAASGRSHSINAMAWFRQVPGKEREFVALISWGNGITYYEDSMKGRFTISRDNAKNTMYLQMNSLRPEDTALYFCAAESYGSSWYDSWGQGTLVTVSS

SEQ ID NO: 2907 - protein, 119 aa, synthetic construct
EVQLVESGGGVVQPGGSLRLSCAASGRIHSINAMAWFRQVPGKEREFVALISWGNGITYYEDSMKGRFTISRDNAKNTMYLQMNSLRPEDTALYFCAAESYGSSWYDSWGQGTLVTVSS

SEQ ID NO: 2908 - protein, 119 aa, synthetic construct
EVQLVESGGGVVQPGGSLRLSCAASGRDHSINAMAWFRQVPGKEREFVALISWGNGITYYEDSMKGRFTISRDNAKNTMYLQMNSLRPEDTALYFCAAESYGSSWYDSWGQGTLVTVSS

SEQ ID NO: 2909 - protein, 119 aa, synthetic construct
EVQLVESGGGVVQPGGSLRLSCAASGRVHSINAMAWFRQVPGKEREFVALISWGNGITYYEDSMKGRFTISRDNAKNTMYLQMNSLRPEDTALYFCAAESYGSSWYDSWGQGTLVTVSS

SEQ ID NO: 2910 - protein, 119 aa, synthetic construct
EVQLVESGGGVVQPGGSLRLSCAASGRKHSINAMAWFRQVPGKEREFVALISWGNGITYYEDSMKGRFTISRDNAKNTMYLQMNSLRPEDTALYFCAAESYGSSWYDSWGQGTLVTVSS

SEQ ID NO: 2911 - protein, 119 aa, synthetic construct
EVQLVESGGGVVQPGGSLRLSCAASGRTHSINAMAWFRQVPGKEREFVALISWGNGITYYEDSMKGRFTISRDNAKNTMYLQMNSLRPEDTALYFCAAESYGSSWYDSWGQGTLVTVSS

SEQ ID NO: 2912 - protein, 119 aa, synthetic construct
EVQLVESGGGVVQPGGSLRLSCAASGRYHSINAMAWFRQVPGKEREFVALISWGNGITYYEDSMKGRFTISRDNAKNTMYLQMNSLRPEDTALYFCAAESYGSSWYDSWGQGTLVTVSS

SEQ ID NO: 2913 - protein, 119 aa, synthetic construct
EVQLVESGGGVVQPGGSLRLSCAASGRAHSINAMAWFRQVPGKEREFVALISWGNGITYYEDSMKGRFTISRDNAKNTMYLQMNSLRPEDTALYFCAAESYGSSWYDSWGQGTLVTVSS

SEQ ID NO: 2914 - protein, 119 aa, synthetic construct
EVQLVESGGGVVQPGGSLRLSCAASGREHSINAMAWFRQVPGKEREFVALISWGNGITYYEDSMKGRFTISRDNAKNTMYLQMNSLRPEDTALYFCAAESYGSSWYDSWGQGTLVTVSS

SEQ ID NO: 2915 - protein, 119 aa, synthetic construct
EVQLVESGGGVVQPGGSLRLSCAASGRGHSINAMAWFRQVPGKEREFVALISWGNGITYYEDSMKGRFTISRDNAKNTMYLQMNSLRPEDTALYFCAAESYGSSWYDSWGQGTLVTVSS

SEQ ID NO: 2916 - protein, 119 aa, synthetic construct
EVQLVESGGGVVQPGGSLRLSCAASGRMRSINAMAWFRQVPGKEREFVALISWGNGITYYEDSMKGRFTISRDNAKNTMYLQMNSLRPEDTALYFCAAESYGSSWYDSWGQGTLVTVSS

SEQ ID NO: 2917 - protein, 119 aa, synthetic construct
EVQLVESGGGVVQPGGSLRLSCAASGRMSSINAMAWFRQVPGKEREFVALISWGNGITYYEDSMKGRFTISRDNAKNTMYLQMNSLRPEDTALYFCAAESYGSSWYDSWGQGTLVTVSS

SEQ ID NO: 2918 - protein, 119 aa, synthetic construct
EVQLVESGGGVVQPGGSLRLSCAASGRMESINAMAWFRQVPGKEREFVALISWGNGITYYEDSMKGRFTISRDNAKNTMYLQMNSLRPEDTALYFCAAESYGSSWYDSWGQGTLVTVSS

SEQ ID NO: 2919 - protein, 119 aa, synthetic construct
EVQLVESGGGVVQPGGSLRLSCAASGRMPSINAMAWFRQVPGKEREFVALISWGNGITYYEDSMKGRFTISRDNAKNTMYLQMNSLRPEDTALYFCAAESYGSSWYDSWGQGTLVTVSS

SEQ ID NO: 2920 - protein, 119 aa, synthetic construct
EVQLVESGGGVVQPGGSLRLSCAASGRMGSINAMAWFRQVPGKEREFVALISWGNGITYYEDSMKGRFTISRDNAKNTMYLQMNSLRPEDTALYFCAAESYGSSWYDSWGQGTLVTVSS

SEQ ID NO: 2921 - protein, 119 aa, synthetic construct
EVQLVESGGGVVQPGGSLRLSCAASGRMQSINAMAWFRQVPGKEREFVALISWGNGITYYEDSMKGRFTISRDNAKNTMYLQMNSLRPEDTALYFCAAESYGSSWYDSWGQGTLVTVSS

SEQ ID NO: 2922 - protein, 119 aa, synthetic construct
EVQLVESGGGVVQPGGSLRLSCAASGRMKSINAMAWFRQVPGKEREFVALISWGNGITYYEDSMKGRFTISRDNAKNTMYLQMNSLRPEDTALYFCAAESYGSSWYDSWGQGTLVTVSS

SEQ ID NO: 2923 - protein, 119 aa, synthetic construct
EVQLVESGGGVVQPGGSLRLSCAASGRMASINAMAWFRQVPGKEREFVALISWGNGITYYEDSMKGRFTISRDNAKNTMYLQMNSLRPEDTALYFCAAESYGSSWYDSWGQGTLVTVSS

SEQ ID NO: 2924 - protein, 119 aa, synthetic construct
EVQLVESGGGVVQPGGSLRLSCAASGRMDSINAMAWFRQVPGKEREFVALISWGNGITYYEDSMKGRFTISRDNAKNTMYLQMNSLRPEDTALYFCAAESYGSSWYDSWGQGTLVTVSS

SEQ ID NO: 2925 - protein, 119 aa, synthetic construct
EVQLVESGGGVVQPGGSLRLSCAASGRMTSINAMAWFRQVPGKEREFVALISWGNGITYYEDSMKGRFTISRDNAKNTMYLQMNSLRPEDTALYFCAAESYGSSWYDSWGQGTLVTVSS

SEQ ID NO: 2926 - protein, 119 aa, synthetic construct
EVQLVESGGGVVQPGGSLRLSCAASGRMVSINAMAWFRQVPGKEREFVALISWGNGITYYEDSMKGRFTISRDNAKNTMYLQMNSLRPEDTALYFCAAESYGSSWYDSWGQGTLVTVSS

SEQ ID NO: 2927 - protein, 119 aa, synthetic construct
EVQLVESGGGVVQPGGSLRLSCAASGRMISINAMAWFRQVPGKEREFVALISWGNGITYYEDSMKGRFTISRDNAKNTMYLQMNSLRPEDTALYFCAAESYGSSWYDSWGQGTLVTVSS

SEQ ID NO: 2928 - protein, 119 aa, synthetic construct
EVQLVESGGGVVQPGGSLRLSCAASGRMFSINAMAWFRQVPGKEREFVALISWGNGITYYEDSMKGRFTISRDNAKNTMYLQMNSLRPEDTALYFCAAESYGSSWYDSWGQGTLVTVSS

SEQ ID NO: 2929 - protein, 119 aa, synthetic construct
EVQLVESGGGVVQPGGSLRLSCAASGRMYSINAMAWFRQVPGKEREFVALISWGNGITYYEDSMKGRFTISRDNAKNTMYLQMNSLRPEDTALYFCAAESYGSSWYDSWGQGTLVTVSS

SEQ ID NO: 2930 - protein, 119 aa, synthetic construct
EVQLVESGGGVVQPGGSLRLSCAASGRMLSINAMAWFRQVPGKEREFVALISWGNGITYYEDSMKGRFTISRDNAKNTMYLQMNSLRPEDTALYFCAAESYGSSWYDSWGQGTLVTVSS

SEQ ID NO: 2931 - protein, 119 aa, synthetic construct
EVQLVESGGGVVQPGGSLRLSCAASGRMHTINAMAWFRQVPGKEREFVALISWGNGITYYEDSMKGRFTISRDNAKNTMYLQMNSLRPEDTALYFCAAESYGSSWYDSWGQGTLVTVSS

SEQ ID NO: 2932 - protein, 119 aa, synthetic construct
EVQLVESGGGVVQPGGSLRLSCAASGRMHKINAMAWFRQVPGKEREFVALISWGNGITYYEDSMKGRFTISRDNAKNTMYLQMNSLRPEDTALYFCAAESYGSSWYDSWGQGTLVTVSS

SEQ ID NO: 2933 - protein, 119 aa, synthetic construct
EVQLVESGGGVVQPGGSLRLSCAASGRMHGINAMAWFRQVPGKEREFVALISWGNGITYYEDSMKGRFTISRDNAKNTMYLQMNSLRPEDTALYFCAAESYGSSWYDSWGQGTLVTVSS

SEQ ID NO: 2934 - protein, 119 aa, synthetic construct
EVQLVESGGGVVQPGGSLRLSCAASGRMHIINAMAWFRQVPGKEREFVALISWGNGITYYEDSMKGRFTISRDNAKNTMYLQMNSLRPEDTALYFCAAESYGSSWYDSWGQGTLVTVSS

SEQ ID NO: 2935 - protein, 119 aa, synthetic construct
EVQLVESGGGVVQPGGSLRLSCAASGRMHYINAMAWFRQVPGKEREFVALISWGNGITYYEDSMKGRFTISRDNAKNTMYLQMNSLRPEDTALYFCAAESYGSSWYDSWGQGTLVTVSS

SEQ ID NO: 2936 - protein, 119 aa, synthetic construct
EVQLVESGGGVVQPGGSLRLSCAASGRMHHINAMAWFRQVPGKEREFVALISWGNGITYYEDSMKGRFTISRDNAKNTMYLQMNSLRPEDTALYFCAAESYGSSWYDSWGQGTLVTVSS

SEQ ID NO: 2937 - protein, 119 aa, synthetic construct
EVQLVESGGGVVQPGGSLRLSCAASGRMHFINAMAWFRQVPGKEREFVALISWGNGITYYEDSMKGRFTISRDNAKNTMYLQMNSLRPEDTALYFCAAESYGSSWYNSWGQGTLVTVSS

SEQ ID NO: 2938 - protein, 119 aa, synthetic construct
EVQLVESGGGVVQPGGSLRLSCAASGRMHSVNAMAWFRQVPGKEREFVALISWGNGITYYEDSMKGRFTISRDNAKNTMYLQMNSLRPEDTALYFCAAESYGSSWYDSWGQGTLVTVSS

SEQ ID NO: 2939 - protein, 119 aa, synthetic construct
EVQLVESGGGVVQPGGSLRLSCAASGRMHDINAMAWFRQVPGKEREFVALISWGNGITYYEDSMKGRFTISRDNAKNTMYLQMNSLRPEDTALYFCAAESYGSSWYDSWGQGTLVTVSS

SEQ ID NO: 2940 - protein, 119 aa, synthetic construct
EVQLVESGGGVVQPGGSLRLSCAASGRMHEINAMAWFRQVPGKEREFVALISWGNGITYYEDSMKGRFTISRDNAKNTMYLQMNSLRPEDTALYFCAAESYGSSWYDSWGQGTLVTVSS

SEQ ID NO: 2941 - protein, 119 aa, synthetic construct
EVQLVESGGGVVQPGGSLRLSCAASGRMHVINAMAWFRQVPGKEREFVALISWGNGITYYEDSMKGRFTISRDNAKNTMYLQMNSLRPEDTALYFCAAESYGSSWYDSWGQGTLVTVSS

SEQ ID NO: 2942 - protein, 119 aa, synthetic construct
EVQLVESGGGVVQPGGSLRLSCAASGRMHFINAMAWFRQVPGKEREFVALISWGNGITYYEDSMKGRFTISRDNAKNTMYLQMNSLRPEDTALYFCAAESYGSSWYDSWGQGTLVTVSS

SEQ ID NO: 2943 - protein, 119 aa, synthetic construct
EVQLVESGGGVVQPGGSLRLSCAASGRMHPINAMAWFRQVPGKEREFVALISWGNGITYYEDSMKGRFTISRDNAKNTMYLQMNSLRPEDTALYFCAAESYGSSWYDSWGQGTLVTVSS

SEQ ID NO: 2944 - protein, 119 aa, synthetic construct
EVQLVESGGGVVQPGGSLRLSCAASGRMHLINAMAWFRQVPGKEREFVALISWGNGITYYEDSMKGRFTISRDNAKNTMYLQMNSLRPEDTALYFCAAESYGSSWYDSWGQGTLVTVSS

SEQ ID NO: 2945 - protein, 119 aa, synthetic construct
EVQLVESGGGVVQPGGSLRLSCAASGRMHSSNAMAWFRQVPGKEREFVALISWGNGITYYEDSMKGRFTISRDNAKNTMYLQMNSLRPEDTALYFCAAESYGSSWYDSWGQGTLVTVSS

SEQ ID NO: 2946 - protein, 119 aa, synthetic construct
EVQLVESGGGVVQPGGSLRLSCAASGRMHSKNAMAWFRQVPGKEREFVALISWGNGITYYEDSMKGRFTISRDNAKNTMYLQMNSLRPEDTALYFCAAESYGSSWYDSWGQGTLVTVSS

SEQ ID NO: 2947 - protein, 119 aa, synthetic construct
EVQLVESGGGVVQPGGSLRLSCAASGRMHSENAMAWFRQVPGKEREFVALISWGNGITYYEDSMKGRFTISRDNAKNTMYLQMNSLRPEDTALYFCAAESYGSSWYDSWGQGTLVTVSS

SEQ ID NO: 2948 - protein, 119 aa, synthetic construct
EVQLVESGGGVVQPGGSLRLSCAASGRMHSDNAMAWFRQVPGKEREFVALISWGNGITYYEDSMKGRFTISRDNAKNTMYLQMNSLRPEDTALYFCAAESYGSSWYDSWGQGTLVTVSS

SEQ ID NO: 2949 - protein, 119 aa, synthetic construct
EVQLVESGGGVVQPGGSLRLSCAASGRMHSQNAMAWFRQVPGKEREFVALISWGNGITYYEDSMKGRFTISRDNAKNTMYLQMNSLRPEDTALYFCAAESYGSSWYDSWGQGTLVTVSS

SEQ ID NO: 2950 - protein, 119 aa, synthetic construct
EVQLVESGGGVVQPGGSLRLSCAASGRMHSRNAMAWFRQVPGKEREFVALISWGNGITYYEDSMKGRFTISRDNAKNTMYLQMNSLRPEDTALYFCAAESYGSSWYDSWGQGTLVTVSS

SEQ ID NO: 2951 - protein, 119 aa, synthetic construct
EVQLVESGGGVVQPGGSLRLSCAASGRMHSPNAMAWFRQVPGKEREFVALISWGNGITYYEDSMKGRFTISRDNAKNTMYLQMNSLRPEDTALYFCAAESYGSSWYDSWGQGTLVTVSS

SEQ ID NO: 2952 - protein, 119 aa, synthetic construct
EVQLVESGGGVVQPGGSLRLSCAASGRMHSGNAMAWFRQVPGKEREFVALISWGNGITYYEDSMKGRFTISRDNAKNTMYLQMNSLRPEDTALYFCAAESYGSSWYDSWGQGTLVTVSS

SEQ ID NO: 2953 - protein, 119 aa, synthetic construct
EVQLVESGGGVVQPGGSLRLSCAASGRMHSTNAMAWFRQVPGKEREFVALISWGNGITYYEDSMKGRFTISRDNAKNTMYLQMNSLRPEDTALYFCAAESYGSSWYDSWGQGTLVTVSS

SEQ ID NO: 2954 - protein, 119 aa, synthetic construct
EVQLVESGGGVVQPGGSLRLSCAASGRMHSLNAMAWFRQVPGKEREFVALISWGNGITYYEDSMKGRFTISRDNAKNTMYLQMNSLRPEDTALYFCAAESYGSSWYDSWGQGTLVTVSS

SEQ ID NO: 2955 - protein, 119 aa, synthetic construct
EVQLVESGGGVVQPGGSLRLSCAASGRMHSFNAMAWFRQVPGKEREFVALISWGNGITYYEDSMKGRFTISRDNAKNTMYLQMNSLRPEDTALYFCAAESYGSSWYDSWGQGTLVTVSS

SEQ ID NO: 2956 - protein, 119 aa, synthetic construct
EVQLVESGGGVVQPGGSLRLSCAASGRMHSIGAMAWFRQVPGKEREFVALISWGNGITYYEDSMKGRFTISRDNAKNTMYLQMNSLRPEDTALYFCAAESYGSSWYDSWGQGTLVTVSS

SEQ ID NO: 2957 - protein, 119 aa, synthetic construct
EVQLVESGGGVVQPGGSLRLSCAASGRMHSIVAMAWFRQVPGKEREFVALISWGNGITYYEDSMKGRFTISRDNAKNTMYLQMNSLRPEDTALYFCAAESYGSSWYDSWGQGTLVTVSS

SEQ ID NO: 2958 - protein, 119 aa, synthetic construct
EVQLVESGGGVVQPGGSLRLSCAASGRMHSIEAMAWFRQVPGKEREFVALISWGNGITYYEDSMKGRFTISRDNAKNTMYLQMNSLRPEDTALYFCAAESYGSSWYDSWGQGTLVTVSS

SEQ ID NO: 2959 - protein, 119 aa, synthetic construct
EVQLVESGGGVVQPGGSLRLSCAASGRMHSILAMAWFRQVPGKEREFVALISWGNGITYYEDSMKGRFTISRDNAKNTMYLQMNSLRPEDTALYFCAAESYGSSWYDSWGQGTLVTVSS

SEQ ID NO: 2960 - protein, 119 aa, synthetic construct
EVQLVESGGGVVQPGGSLRLSCAASGRMHSIYAMAWFRQVPGKEREFVALISWGNGITYYEDSMKGRFTISRDNAKNTMYLQMNSLRPEDTALYFCAAESYGSSWYDSWGQGTLVTVSS

SEQ ID NO: 2961 - protein, 119 aa, synthetic construct
EVQLVESGGGVVQPGGSLRLSCAASGRMHSIQAMAWFRQVPGKEREFVALISWGNGITYYEDSMKGRFTISRDNAKNTMYLQMNSLRPEDTALYFCAAESYGSSWYDSWGQGTLVTVSS

SEQ ID NO: 2962 - protein, 119 aa, synthetic construct
EVQLVESGGGVVQPGGSLRLSCAASGRMHSITAMAWFRQVPGKEREFVALISWGNGITYYEDSMKGRFTISRDNAKNTMYLQMNSLRPEDTALYFCAAESYGSSWYDSWGQGTLVTVSS

SEQ ID NO: 2963 - protein, 119 aa, synthetic construct
EVQLVESGGGVVQPGGSLRLSCAASGRMHSIFAMAWFRQVPGKEREFVALISWGNGITYYEDSMKGRFTISRDNAKNTMYLQMNSLRPEDTALYFCAAESYGSSWYDSWGQGTLVTVSS

SEQ ID NO: 2964 - protein, 119 aa, synthetic construct
EVQLVESGGGVVQPGGSLRLSCAASGRMHSIPAMAWFRQVPGKEREFVALISWGNGITYYEDSMKGRFTISRDNAKNTMYLQMNSLRPEDTALYFCAAESYGSSWYDSWGQGTLVTVSS

SEQ ID NO: 2965 - protein, 119 aa, synthetic construct
EVQLVESGGGVVQPGGSLRLSCAASGRMHSIHAMAWFRQVPGKEREFVALISWGNGITYYEDSMKGRFTISRDNAKNTMYLQMNSLRPEDTALYFCAAESYGSSWYDSWGQGTLVTVSS

SEQ ID NO: 2966 - protein, 119 aa, synthetic construct
EVQLVESGGGVVQPGGSLRLSCAASGRMHSIIAMAWFRQVPGKEREFVALISWGNGITYYEDSMKGRFTISRDNAKNTMYLQMNSLRPEDTALYFCAAESYGSSWYDSWGQGTLVTVSS

SEQ ID NO: 2967 - protein, 119 aa, synthetic construct
EVQLVESGGGVVQPGGSLRLSCAASGRMHSINDMAWFRQVPGKEREFVALISWGNGITYYEDSMKGRFTISRDNAKNTMYLQMNSLRPEDTALYFCAAESYGSSWYDSWGQGTLVTVSS

SEQ ID NO: 2968 - protein, 119 aa, synthetic construct
EVQLVESGGGVVQPGGSLRLSCAASGRMHSINEMAWFRQVPGKEREFVALISWGNGITYYEDSMKGRFTISRDNAKNTMYLQMNSLRPEDTALYFCAAESYGSSWYDSWGQGTLVTVSS

SEQ ID NO: 2969 - protein, 119 aa, synthetic construct
EVQLVESGGGVVQPGGSLRLSCAASGRMHSINIMAWFRQVPGKEREFVALISWGNGITYYEDSMKGRFTISRDNAKNTMYLQMNSLRPEDTALYFCAAESYGSSWYDSWGQGTLVTVSS

SEQ ID NO: 2970 - protein, 119 aa, synthetic construct
EVQLVESGGGVVQPGGSLRLSCAASGRMHSINHMAWFRQVPGKEREFVALISWGNGITYYEDSMKGRFTISRDNAKNTMYLQMNSLRPEDTALYFCAAESYGSSWYDSWGQGTLVTVSS

SEQ ID NO: 2971 - protein, 119 aa, synthetic construct
EVQLVESGGGVVQPGGSLRLSCAASGRMHSINSMAWFRQVPGKEREFVALISWGNGITYYEDSMKGRFTISRDNAKNTMYLQMNSLRPEDTALYFCAAESYGSSWYDSWGQGTLVTVSS

SEQ ID NO: 2972 - protein, 119 aa, synthetic construct
EVQLVESGGGVVQPGGSLRLSCAASGRMHSINAMAWFRQVPGKEREFVALISWGDGITYYEDSMKGRFTISRDNAKNTMYLQMNSLRPEDTALYFCAAESYGSSWYDSWGQGTLVTVSS

SEQ ID NO: 2973 - protein, 119 aa, synthetic construct
EVQLVESGGGVVQPGGSLRLSCAASGRMHSINVMAWFRQVPGKEREFVALISWGNGITYYEDSMKGRFTISRDNAKNTMYLQMNSLRPEDTALYFCAAESYGSSWYDSWGQGTLVTVSS

SEQ ID NO: 2974 - protein, 119 aa, synthetic construct
EVQLVESGGGVVQPGGSLRLSCAASGRMHSINLMAWFRQVPGKEREFVALISWGNGITYYEDSMKGRFTISRDNAKNTMYLQMNSLRPEDTALYFCAAESYGSSWYDSWGQGTLVTVSS

SEQ ID NO: 2975 - protein, 119 aa, synthetic construct
EVQLVESGGGVVQPGGSLRLSCTASGRMHSINDMAWFRQVPGKEREFVALISWGNGITYYEDSMKGRFTISRDNAKNTMYLQMNSLRPEDTALYFCAAESYGSSWYDSWGQGTLVTVSS

SEQ ID NO: 2976 - protein, 119 aa, synthetic construct
EVQLVESGGGVVQPGGSLRLSCAASGRMHSINKMAWFRQVPGKEREFVALISWGNGITYYEDSMKGRFTISRDNAKNTMYLQMNSLRPEDTALYFCAAESYGSSWYDSWGQGTLVTVSS

SEQ ID NO: 2977 - protein, 119 aa, synthetic construct
EVQLVESGGGVVQPGGSLRLSCAASGRMHSINGMAWFRQVPGKEREFVALISWGNGITYYEDSMKGRFTISRDNAKNTMYLQMNSLRPEDTALYLCAAESYGSSWYDSWGQGTLVTVSS

SEQ ID NO: 2978 - protein, 119 aa, synthetic construct
EVQLVESGGGVVQPGGSLRLSCAASGRMHSINTMAWFRQVPGKEREFVALISWGNGITYYEDSMKGRFTISRDNAKNTMYLQMNSLRPEDTALYFCAAESYGSSWYDSWGQGTLVTVSS

SEQ ID NO: 2979 - protein, 119 aa, synthetic construct
EVQLVESGGGVVQPGGSLRLSCAASGRMHSINYMAWFRQVPGKEREFVALISWGNGITYYEDSMKGRFTISRDNAKNTMYLQMNSLRPEDTALYFCAAESYGSSWYDSWGQGTLVTVSS

SEQ ID NO: 2980 - protein, 119 aa, synthetic construct
EVQLVESGGGVVQPGGSLRLSCAASGRMHSINAMHWFRQVPGKEREFVALISWGNGITYYEDSMKGRFTISRDNAKNTMYLQMNSLRPEDTALYFCAAESYGSSWYDSWGQGTLVTVSS

SEQ ID NO: 2981 - protein, 119 aa, synthetic construct
EVQLVESGGGVVQPGGSLRLSCAASGRMHSINAMFWFRQVPGKEREFVALISWGNGITYYEDSMKGRFTISRDNAKNTMYLQMNSLRPEDTALYFCAAESYGSSWYDSWGQGTLVTVSS

SEQ ID NO: 2982 - protein, 119 aa, synthetic construct
EVQLVESGGGVVQPGGSLRLSCAASGRMHSINAMKWFRQVPGKEREFVALISWGNGITYYEDSMKGRFTISRDNAKNTMYLQMNSLRPEDTALYFCAAESYGSSWYDSWGQGTLVTVSS

SEQ ID NO: 2983 - protein, 119 aa, synthetic construct
EVQLVESGGGVVQPGGSLRLSCAASGRMHSINAMLWFRQVPGKEREFVALISWGNGITYYEDSMKGRFTISRDNAKNTMYLQMNSLRPEDTALYFCAAESYGSSWYDSWGQGTLVTVSS

SEQ ID NO: 2984 - protein, 119 aa, synthetic construct
EVQLVESGGGVVQPGGSLRLSCAASGRMHSINAMDWFRQVPGKEREFVALISWGNGITYYEDSMKGRFTISRDNAKNTMYLQMNSLRPEDTALYFCAAESYGSSWYDSWGQGTLVTVSS

SEQ ID NO: 2985 - protein, 119 aa, synthetic construct
EVQLVESGGGVVQPGGSLRLSCAASGRMHSINAMPWFRQVPGKEREFVALISWGNGITYYEDSMKGRFTISRDNAKNTMYLQMNSLRPEDTALYFCAAESYGSSWYDSWGQGTLVTVSS

SEQ ID NO: 2986 - protein, 119 aa, synthetic construct
EVQLVESGGGVVQPGGSLRLSCSASGRMHSINAMTWFRQVPGKEREFVALISWGNGITYYEDSMKGRFTISRDNAKNTMYLQMNSLRPEDTALYFCAAESYGSSWYDSWGQGTLVTVSS

SEQ ID NO: 2987 - protein, 119 aa, synthetic construct
EVQLVESGGGVVQPGGSLRLSCAASGRMHSINAMSWFRQVPGKEREFVALISWGNGITYYEDSMKGRFTISRDNAKNTMYLQMNSLRPEDTALYFCAAESYGSSWYDSWGQGTLVTVSS

SEQ ID NO: 2988 - protein, 119 aa, synthetic construct
EVQLVESGGGVVQPGGSLRLSCAASGRMHSINAMVWFRQVPGKEREFVALISWGNGITYYEDSMKGRFTISRDNAKNTMYLQMNSLRPEDTALYFCAAESYGSSWYDSWGQGTLVTVSS

SEQ ID NO: 2989 - protein, 119 aa, synthetic construct
EVQLVESGGGVVQPGGSLRLSCAASGRMHSINAMGWFRQVPGKEREFVALISWGNGITYYEDSMKGRFTISRDNAKNTMYLQMNSLRPEDTALYFCAAESYGSSWYDSWGQGTLVTVSS

SEQ ID NO: 2990 - protein, 119 aa, synthetic construct
EVQLVESGGGVVQPGGSLRLSCAASGRMHSINAMYWFRQVPGKEREFVALISWGNGITYYEDSMKGRFTISRDNAKNTMYLQMNSLRPEDTALYFCAAESYGSSWYDSWGQGTLVTVSS

SEQ ID NO: 2991 - protein, 119 aa, synthetic construct
EVQLVESGGGVVQPGGSLRLSCAASGRMHSINAMRWFRQVPGKEREFVALISWGNGITYYEDSMKGRFTISRDNAKNTMYLQMNSLRPEDTALYFCAAESYGSSWYDSWGQGTLVTVSS

SEQ ID NO: 2992 - protein, 119 aa, synthetic construct
EVQLVESGGGVVQPGGSLRLSCAASGRMHSINAMQWFRQVPGKEREFVALISWGNGITYYEDSMKGRFTISRDNAKNTMYLQMNSLRPEDTALYFCAAESYGSSWYDSWGQGTLVTVSS

SEQ ID NO: 2993 - protein, 119 aa, synthetic construct
EVQLVESGGGVVQPGGSLRLSCAASGRMHSINAMTWFRQVPGKEREFVALISWGNGITYYEDSMKGRFTISRDNAKNTMYLQMNSLRPEDTALYFCAAESYGSSWYDSWGQGTLVTVSS

SEQ ID NO: 2994 - protein, 119 aa, synthetic construct
EVQLVESGGGVVQPGGSLRLSCAASGRMHSINAMAWFRQVPGKEREFVAVISWGNGITYYEDSMKGRFTISRDNAKNTMYLQMNSLRPEDTALYFCAAESYGSSWYDSWGQGTLVTVSS

SEQ ID NO: 2995 - protein, 119 aa, synthetic construct
EVQLVESGGGVVQPGGSLRLSCAASGRMHSINAMAWFRQVPGKEREFVAIISWGNGITYYEDPMKGRFTISRDNAKNTMYLQMNSLRPEDTALYFCAAESYGSSWYDSWGQGTLVTVSS

SEQ ID NO: 2996 - protein, 119 aa, synthetic construct
EVQLVESGGGVVQPGGSLRLSCAASGRMHSINAMAWFRQVPGKEREFVATISWGNGITYYEDSMKGRFTISRDNAKNTMYLQMNSLRPEDTALYFCAAESYGSSWYDSWGQGTLVTVSS

SEQ ID NO: 2997 - protein, 119 aa, synthetic construct
EVQLVESGGGVVQPGGSLRLSCAASGRMHSINAMAWFRQVPGKEREFVAFISWGNGITYYEDSMKGRFTISRDNAKNTMYLQMNSLRPEDTALYFCAAESYGSSWYDSWGQGTLVTVSS

SEQ ID NO: 2998 - protein, 119 aa, synthetic construct
EVQLVESGGGVVQPGGSLRLSCAASGRMHSINAMAWFRQVPGKEREFVAEISWGNGITYYEDSMKGRFTISRDNAKNTMYLQMNSLRPEDTALYFCAAESYGSSWYDSWGQGTLVTVSS

SEQ ID NO: 2999 - protein, 119 aa, synthetic construct
EVQLVESGGGVVQPGGSLRLSCAASGRMHSINAMAWFRQVPGKEREFVAQISWGNGITYYEDSMKGRFTISRDNAKNTMYLQMNSLRPEDTALYFCAAESYGSSWYDSWGQGTLVTVSS

SEQ ID NO: 3000 - protein, 119 aa, synthetic construct
EVQLVESGGGVVQPGGSLRLSCAASGRMHSINAMAWFRQVPGKEREFVADISWGNGITYYEDSMKGRFTISRDNAKNTMYLQMNSLRPEDTALYFCAAESYGSSWYDSWGQGTLVTVSS

SEQ ID NO: 3001 - protein, 119 aa, synthetic construct
EVQLVESGGGVVQPGGSLRLSCAASGRMHSINAMAWFRQVPGKEREFVARISWGNGITYYEDSMKGRFTISRDNAKNTMYLQMNSLRPEDTALYFCAAESYGSSWYDSWGQGTLVTVSS

SEQ ID NO: 3002 - protein, 119 aa, synthetic construct
EVQLVESGGGVVQPGGSLRLSCAASGRMHSINAMAWFRQVPGKEREFVAGISWGNGITYYEDSMKGRFTISRDNAKNTMYLQMNSLRPEDTALYFCAAESYGSSWYDSWGQGTLVTVSS

SEQ ID NO: 3003 - protein, 119 aa, synthetic construct
EVQLVESGGGVVQPGGSLRLSCAASGRMHSINAMAWFRQVPGKEREFVASISWGNGITYYEDSMKGRFTISRDNAKNTMYLQMNSLRPEDTALYFCAAESYGSSWYDSWGQGTLVTVSS

SEQ ID NO: 3004 - protein, 119 aa, synthetic construct
EVQLVESGGGVVQPGGSLRLSCAASGRMHSINAMAWFRQVPGKEREFVAAISWGNGITYYEDSMKGRFTISRDNAKNTMYLQMNSLRPEDTALYFCAAESYGSSWYDSWGQGTLVTVSS

SEQ ID NO: 3005 - protein, 119 aa, synthetic construct
EVQLVESGGGVVQPGGSLRLSCAASGRMHSINAMAWFRQVPGKEREFVAPISWGNGITYYEDSMKGRFTISRDNAKNTMYLQMNSLRPEDTALYFCAAESYGSSWYDSWGQGTLVTVSS

SEQ ID NO: 3006 - protein, 119 aa, synthetic construct
EVQLVESGGGVVQPGGSLRLSCAASGRMHSINAMAWFRQVPGKEREFVAIISWGNGITYYEDSMKGRFTISRDNAKNTMYLQMNSLRPEDTALYFCAAESYGSSWYDSWGQGTLVTVSS

SEQ ID NO: 3007 - protein, 119 aa, synthetic construct
EVQLVESGGGVVQPGGSLRLSCAASGRMHSINAMAWFRQVPGKEREFVAHISWGNGITYYEDSMKGRFTISRDNAKNTMYLQMNSLRPEDTALYFCAAESYGSSWYDSWGQGTLVTVSS

SEQ ID NO: 3008 - protein, 119 aa, synthetic construct
EVQLVESGGGVVQPGGSLRLSCAASGRMHSINAMAWFRQVPGKEREFVAKISWGNGITYYEDSMKGRFTISRDNAKNTMYLQMNSLRPEDTALYFCAAESYGSSWYDSWGQGTLVTVSS

SEQ ID NO: 3009 - protein, 119 aa, synthetic construct
EVQLVESGGGVVQLGGSLRLSCAASGRMHSINAMAWFRQVPGKEREFVALGSWGNGITYYEDSMKGRFTISRDNAKNTMYLQMNSLRPEDTALYFCAAESYGSSWYDSWGQGTLVTVSS

SEQ ID NO: 3010 - protein, 119 aa, synthetic construct
EVQLVESGGGVVQPGGSLRLSCAASGRMHSINAMAWFRQVPGKEREFVALYSWGNGITYYEDSMKGRFTISRDNAKNTMYLQMNSLRPEDTALYFCAAESYGSSWYDSWGQGTLVTVSS

SEQ ID NO: 3011 - protein, 119 aa, synthetic construct
EVQLVESGGGVVQPGGSLRLSCAASGRMHSINAMAWFRQVPGKEREFVALASWGNGITYYEDSMKGRFTISRDNAKNTMYLQMNSLRPEDTALYFCAAESYGSSWYDSWGQGTLVTVSS

SEQ ID NO: 3012 - protein, 119 aa, synthetic construct
EVQLVESGGGVVQPGGSLRLSCAASGRMHSINAMAWFRQVPGKEREFVALQSWGNGITYYEDSMKGRFTISRDNAKNTMYLQMNSLRPEDTALYFCAAESYGSSWYDSWGQGTLVTVSS

SEQ ID NO: 3013 - protein, 119 aa, synthetic construct
EVQLVESGGGVVQPGGSLRLSCAASGRMHSINAMAWFRQVPGKEREFVALGSWGNGITYYEDSMKGRFTISRDNAKNTMYLQMNSLRPEDTALYFCAAESYGSSWYDSWGQGTLVTVSS

SEQ ID NO: 3014 - protein, 119 aa, synthetic construct
EVQLVESGGGVVQPGGSLRLSCAASGRMHSINAMAWFRQVPGKEREFVALHSWGNGITYYEDSMKGRFTISRDNAKNTMYLQMNSLRPEDTALYFCAAESYGSSWYDSWGQGTLVTVSS

SEQ ID NO: 3015 - protein, 119 aa, synthetic construct
EVQLVESGGGVVQPGGSLRLSCAASGRMHSINAMAWFRQVPGKEREFVALTSWGNGITYYEDSMKGRFTISRDNAKNTMYLQMNSLRPEDTALYFCAAESYGSSWYDSWGQGTLVTVSS

SEQ ID NO: 3016 - protein, 119 aa, synthetic construct
EVQLVESGGGVVQPGGSLRLSCAASGRMHSINAMAWFRQVPGKEREFVALLSWGNGITYYEDSMKGRFTISRDNAKNTMYLQMNSLRPEDTALYFCAAESYGSSWYDSWGQGTLVTVSS

SEQ ID NO: 3017 - protein, 119 aa, synthetic construct
EVQLVESGGGVVQPGGSLRLSCAASGRMHSINAMAWFRQVPGKEREFVALSSWGNGITYYEDSMKGRFTISRDNAKNTMYLQMNSLRPEDTALYFCAAESYGSSWYDSWGQGTLVTVSS

SEQ ID NO: 3018 - protein, 119 aa, synthetic construct
EVQLVESGGGVVQPGGSLRLSCAASGRMHSINAMAWFRQVPGKEREFVALDSWGNGITYYEDSMKGRFTISRDNAKNTMYLQMNSLRPEDTALYFCAAESYGSSWYDSWGQGTLVTVSS

SEQ ID NO: 3019 - protein, 119 aa, synthetic construct
EVQLVESGGGVVQPGGSLRLSCAASGRMHSINAMAWFRQVPGKEREFVALRSWGNGITYYEDSMKGRFTISRDNAKNTMYLQMNSLRPEDTALYFCAAESYGSSWYDSWGQGTLVTVSS

SEQ ID NO: 3020 - protein, 119 aa, synthetic construct
EVQLVESGGGVVQPGGSLRLSCAASGRMHSTNAMAWFRQVPGKEREFVALKSWGNGITYYEDSMKGRFTISRDNAKNTMYLQMNSLRPEDTALYFCAAESYGSSWYDSWGQGTLVTVSS

SEQ ID NO: 3021 - protein, 119 aa, synthetic construct
EVQLVESGGGVVQPGGSLRLSCAASGRMHSINAMAWFRQVPGKEREFVALPSWGNGITYYEDSMKGRFTISRDNAKNTMYLQMNSLRPEDTALYFCAAESYGSSWYDSWGQGTLVTVSS

SEQ ID NO: 3022 - protein, 119 aa, synthetic construct
EVQLVESGGGVVQPGGSLRLSCAASGRMHSINAMAWFRQVPGKEREFVALIGWGNGITYYEDSMKGRFTISRDNAKNTMYLQMNSLRPEDTALYFCAAESYGSSWYDSWGQGTLVTVSS

SEQ ID NO: 3023 - protein, 119 aa, synthetic construct
EVQLVESGGGVVQPGGSLRLSCAASGRMHSINAMAWFRQVPGKEREFVALILWGNGITYYEDSMKGRFTISRDNAKNTMYLQMNSLRPEDTALYFCAAESYGSSWYDSWGQGTLVTVSS

SEQ ID NO: 3024 - protein, 119 aa, synthetic construct
EVQLVESGGGVVQPGGSLRLSCAASGRMHSINAMAWFRQVPGKEREFVALIKLGNGITYYEDSMKGRFTISRDNAKNTMYLQMNSLRPEDTALYFCAAESYGSSWYDSWGQGTLVTVSS

SEQ ID NO: 3025 - protein, 119 aa, synthetic construct
EVQLVESGGGVVQPGGSLRLSCAASGRMHSINAMAWFRQVPGKEREFVALIVWGNGITYYEDSMKGRFTISRDNAKNTMYLQMNSLRPEDTALYFCAAESYGSSWYDSWGQGTLVTVSS

SEQ ID NO: 3026 - protein, 119 aa, synthetic construct
EVQLVESGGGVVQPGGSLRLSCAASGRMHSINAMAWFRQVPGKEREFVALIKWGNGITYYEDSMKGRFTISRDNAKNTMYLQMNSLRPEDTALYFCAAESYGSSWYDSWGQGTLVTVSS

SEQ ID NO: 3027 - protein, 119 aa, synthetic construct
EVQLVESGGGVVQPGGSLRLSCAASGRMHSINAMAWFRQVPGKEREFVALIFWGNGITYYEDSMKGRFTISRDNAKNTMYLQMNSLRPEDTALYFCAAESYGSSWYDSWGQGTLVTVSS

SEQ ID NO: 3028 - protein, 119 aa, synthetic construct
EVQLVESGGGVVQPGGSLRLSCAASGRMHSINAMAWFRQVPGKEREFVALIIWGNGITYYEDSMKGRFTISRDNAKNTMYLQMNSLRPEDTALYFCAAESYGSSWYDSWGQGTLVTVSS

SEQ ID NO: 3029 - protein, 119 aa, synthetic construct
EVQLVESGGGVVQPGGSLRLSCAASGRMHSINAMAWFRQVPGKEREFVALITWGNGITYYEDSMKGRFTISRDNAKNTMYLQMNSLRPEDTALYFCAAESYGSSWYDSWGQGTLVTVSS

SEQ ID NO: 3030 - protein, 119 aa, synthetic construct
EVQLVESGGGVVQPGGSLRLSCAASGRMHSINAMAWFRQVPGKEREFVALIEWGNGITYYEDSMKGRFTISRDNAKNTMYLQMNSLRPEDTALYFCAAESYGSSWYDSWGQGTLVTVSS

SEQ ID NO: 3031 - protein, 119 aa, synthetic construct
EVQLVESGGGVVQPGGSLRLSCAASGRMHSINAMAWFRQVPGKEREFVALIAWGNGITYYEDSMKGRFTISRDNAKNTMYLQMNSLRPEDTALYFCAAESYGSSWYDSWGQGTLVTVSS

SEQ ID NO: 3032 - protein, 119 aa, synthetic construct
EVQLVESGGGVVQPGGSLRLSCAASGRMHSINAMAWFRQVPGKEREFVALIDWGNGITYYEDSMKGRFTISRDNAKNTMYLQMNSLRPEDTALYFCAAESYGSSWYDSWGQGTLVTVSS

SEQ ID NO: 3033 - protein, 119 aa, synthetic construct
EVQLVESGGGVVQPGGSLRLSCAASGRMHSINAMAWFRQVPGKEREFVALIHWGNGITYYEDSMKGRFTISRDNAKNTMYLQMNSLRPEDTALYFCAAESYGSSWYDSWGQGTLVTVSS

SEQ ID NO: 3034 - protein, 119 aa, synthetic construct
EVQLVESGGGVVQPGGSLRLSCAASGRMHSINAMAWFRQVPGKEREFVALIPWGNGITYYEDSMKGRFTISRDNAKNTMYLQMNSLRPEDTALYFCAAESYGSSWYDSWGQGTLVTVSS

SEQ ID NO: 3035 - protein, 119 aa, synthetic construct
EVQLVESGGGVVQPGGSLRLSCAASGRMHSINAMAWFRQVPGKEREFVALIQWGNGITYYEDSMKGRFTISRDNAKNTMYLQMNSLRPEDTALYFCAAESYGSSWYDSWGQGTLVTVSS

SEQ ID NO: 3036 - protein, 119 aa, synthetic construct
EVQLVESGGGVVQPGGSLRLSCAASGRMHSINAMAWFRQVPGKEREFVALISKGNGITYYEDSMKGRFTISRDNAKNTMYLQMNSLRPEDTALYFCAAESYGSSWYDSWGQGTLVTVSS

SEQ ID NO: 3037 - protein, 119 aa, synthetic construct
EVQLVESGGGVVQPGGSLRLSCAASGRMHSINAMAWFRQVPGKEREFVALISSGNGITYYEDSMKGRFTISRDNAKNTMYLQMNSLRPEDTALYFCAAESYGSSWYDSWGQGTLVTVSS

SEQ ID NO: 3038 - protein, 119 aa, synthetic construct
EVQLVESGGGVVQPGGSLRLSCAASGRMHSINAMAWFRQVPGKEREFVALISFGNGITYYEDSMKGRFTISRDNAKNTMYLQMNSLRPEDTALYFCAAESYGSSWYDSWGQGTLVTVSS

SEQ ID NO: 3039 - protein, 119 aa, synthetic construct
EVQLVESGGGVVQPGGSLRLSCAASGRMHSINAMAWFRQVPGKEREFVALISGGNGITYYEDSMKGRFTISRDNAKNTMYLQMNSLRPEDTALYFCAAESYGSSWYDSWGQGTLVTVSS

SEQ ID NO: 3040 - protein, 119 aa, synthetic construct
EVQLVESGGGVVQPGGSLRLSCAASGRMHSINAMAWFRQVPGKEREFVALISYGNGITYYEDSMKGRFTISRDNAKNTMYLQMNSLRPEDTALYFCAAESYGSSWYDSWGQGTLVTVSS

SEQ ID NO: 3041 - protein, 119 aa, synthetic construct
EVQLVESGGGVVQPGGSLRLSCAASGRMHSINAMAWFRQVPGKEREFVALISPGNGITYYEDSMKGRFTISRDNAKNTMYLQMNSLRPEDTALYFCAAESYGSSWYDSWGQGTLVTVSS

SEQ ID NO: 3042 - protein, 119 aa, synthetic construct
EVQLVESGGGVVQPGGSLRLSCAASGRMHSINAMAWFRQVPGKEREFVALISRGNGITYYEDSMKGRFTISRDNAKNTMYLQMNSLRPEDTALYFCAAESYGSSWYDSWGQGTLVTVSS

SEQ ID NO: 3043 - protein, 119 aa, synthetic construct
EVQLVESGGGVVQPGGSLRLSCAASGRMHSINAMAWFRQVPGKEREFVALISAGNGITYYEDSMKGRFTISRDNAKNTMYLQMNSLRPEDTALYFCAAESYGSSWYDSWGQGTLVTVSS

SEQ ID NO: 3044 - protein, 119 aa, synthetic construct
EVQLVESGGGVVQPGGSLRLSCAASGRMHSINAMAWFRQVPGKEREFVALISIGNGITYYEDSMKGRFTISRDNAKNTMYLQMNSLRPEDTALYFCAAESYGSSWYDSWGQGTLVTVSS

SEQ ID NO: 3045 - protein, 119 aa, synthetic construct
EVQLVESGGGVVQPGGSLRLSCAASGRMHSINAMAWFRQVPGKEREFVALISEGNGITYYEDSMKGRFTISRDNAKNTMYLQMNSLRPEDTALYFCAAESYGSSWYDSWGQGTLVTVSS

SEQ ID NO: 3046 - protein, 119 aa, synthetic construct
EVQLVESGGGVVQPGGSLRLSCAASGRMHSINAMAWFRQVPGKEREFVALISTGNGITYYEDSMKGRFTISRDNAKNTMYLQMNSLRPEDTALYFCAAESYGSSWYDSWGQGTLVTVSS

SEQ ID NO: 3047 - protein, 119 aa, synthetic construct
EVQLVESGGGVVQPGGSLRLSCAASGRMHSINAMAWFRQVPGKEREFVALISHGNGITYYEDSMKGRFTISRDNAKNTMYLQMNSLRPEDTALYFCAAESYGSSWYDSWGQGTLVTVSS

SEQ ID NO: 3048 - protein, 119 aa, synthetic construct
EVQLVESGGGVVQPGGSLRLSCAASGRMHSINAMAWFRQVPGKEREFVALISLGNGITYYEDSMKGRFTISRDNAKNTMYLQMNSLRPEDTALYFCAAESYGSSWYDSWGQGTLVTVSS

SEQ ID NO: 3049 - protein, 119 aa, synthetic construct
EVQLVESGGGVVQPGGSLRLSCAASGRMHSINAMAWFRQVPGKEREFVALISDGNGITYYEDSMKGRFTISRDNAKNTMYLQMNSLRPEDTALYFCAAESYGSSWYDSWGQGTLVTVSS

SEQ ID NO: 3050 - protein, 119 aa, synthetic construct
EVQLVESGGGVVQPGGSLRLSCAASGRMHSINAMAWFRQVPGKEREFVALISVGNGITYYEDSMKGRFTISRDNAKNTMYLQMNSLRPEDTALYFCAAESYGSSWYDSWGQGTLVTVSS

SEQ ID NO: 3051 - protein, 119 aa, synthetic construct
EVQLVESGGGVVQPGGSLRLSCAASGRMHSINAMAWFRQVPGKEREFVALISQGNGITYYEDSMKGRFTISRDNAKNTMYLQMNSLRPEDTALYFCAAESYGSSWYDSWGQGTLVTVSS

SEQ ID NO: 3052 - protein, 119 aa, synthetic construct
EVQLVESGGGVVQPGGSLRLSCAASGRMHSINAMAWFRQVPGKEREFVALISWLNGITYYEDSMKGRFTISRDNAKNTMYLQMNSLRPEDTALYFCAAESYGSSWYDSWGQGTLVTVSS

SEQ ID NO: 3053 - protein, 119 aa, synthetic construct
EVQLVESGGGVVQPGGSLRLSCAASGRMHSINAMAWFRQVPGKEREFVALISWTNGITYYEDSMKGRFTISRDNAKNTMYLQMNSLRPEDTALYFCAAESYGSSWYDSWGQGTLVTVSS

SEQ ID NO: 3054 - protein, 119 aa, synthetic construct
EVQLVESGGGVVQPGGSLRLSCAASGRMHSINAMAWFRQVPGKEREFVALISWYNGITYYEDSMKGRFTISRDNAKNTMYLQMNSLRPEDTALYFCAAESYGSSWYDSWGQGTLVTVSS

SEQ ID NO: 3055 - protein, 119 aa, synthetic construct
EVQLVESGGGVVQPGGSLRLSCAASGRMHSINAMAWFRQVPGKEREFVALISWRNGITYYEDSMKGRFTISRDNAKNTMYLQMNSLRPEDTALYFCAAESYGSSWYDSWGQGTLVTVSS

SEQ ID NO: 3056 - protein, 119 aa, synthetic construct
EVQLVESGGGVVQPGGSLRLSCAASGRMHSINAMAWFRQVPGKEREFVALISWVNGITYYEDSMKGRFTISRDNAKNTMYLQMNSLRPEDTALYFCAAESYGSSWYDSWGQGTLVTVSS

SEQ ID NO: 3057 - protein, 119 aa, synthetic construct
EVQLVESGGGVVQPGGSLRLSCAASGRMHSINAMAWFRQVPGKEREFVALISWPNGITYYEDSMKGRFTISRDNAKNTMYLQMNSLRPEDTALYFCAAESYGSSWYDSWGQGTLVTVSS

SEQ ID NO: 3058 - protein, 119 aa, synthetic construct
EVQLVESGGGVVQPGGSLRLSCAASGRMHSINAMAWFRQVPGKEREFVALISWQNGITYYEDSMKGRFTISRDNAKNTMYLQMNSLRPEDTALYFCAAESYGSSWYDSWGQGTLVTVSS

SEQ ID NO: 3059 - protein, 119 aa, synthetic construct
EVQLVESGGGVVQPGGSLRLSCAASGRMHSINAMAWFRQVPGKEREFVALISWFNGITYYEDSMKGRFTISRDNAKNTMYLQMNSLRPEDTALYFCAAESYGSSWYDSWGQGTLVTVSS

SEQ ID NO: 3060 - protein, 119 aa, synthetic construct
EVQLVESGGGVVQPGGSLRLSCAASGRMHSINAMAWFRQVPGKEREFVALISWANGITYYEDSMKGRFTISRDNAKNTMYLQMNSLRPEDTALYFCAAESYGSSWYDSWGQGTLVTVSS

SEQ ID NO: 3061 - protein, 119 aa, synthetic construct
EVQLVESGGGVVQPGGSLRLSCAASGRMHSINAMAWFRQVPGKEREFVALISWSNGITYYEDSMKGRFTISRDNAKNTMYLQMNSLRPEDTALYFCAAESYGSSWYDSWGQGTLVTVSS

SEQ ID NO: 3062 - protein, 119 aa, synthetic construct
EVQLVESGGGVVQPGGSLRLSCAASGRMHSINAMAWFRQVPGKEREFVALISWGHGITYYEDSMKGRFTISRDNAKNTMYLQMNSLRPEDTALYFCAAESYGSSWYDSWGQGTLVTVSS

SEQ ID NO: 3063 - protein, 119 aa, synthetic construct
EVQLVESGGGVVQPGGSLRLSCAASGRMHSINAMAWFRQVPGKEREFVALISWGTGITYYEDSMKGRFTISRDNAKNTMYLQMNSLRPEDTALYFCAAESYGSSWYDSWGQGTLVTVSS

SEQ ID NO: 3064 - protein, 119 aa, synthetic construct
EVQLVESGGGVVQPGGSLRLSCAASGRMHSINAMAWFRQVPGKEREFVALISWGAGITYYEDSMKGRFTISRDNAKNTMYLQMNSLRPEDTALYFCAAESYGSSWYDSWGQGTLVTVSS

SEQ ID NO: 3065 - protein, 119 aa, synthetic construct
EVQLVESGGGVVQPGGSLRLSCAASGRMHSINAMAWFRQVPGKEREFVALISWGFGITYYEDSMKGRFTISRDNAKNTMYLQMNSLRPEDTALYFCAAESYGSSWYDSWGQGTLVTVSS

SEQ ID NO: 3066 - protein, 119 aa, synthetic construct
EVQLVESGGGVVQPGGSLRLSCAASGRMHSINAMAWFRQVPGKEREFVALISWGEGITYYEDSMKGRFTISRDNAKNTMYLQMNSLRPEDTALYFCAAESYGSSWYDSWGQGTLVTVSS

SEQ ID NO: 3067 - protein, 119 aa, synthetic construct
EVQLVESGGGVVQPGGSLRLSCAASGRMHSINAMAWFRQVPGKEREFVALISWGSGITYYEDSMKGRFTISRDNAKNTMYLQMNSLRPEDTALYFCAAESYGSSWYDSWGQGTLVTVSS

SEQ ID NO: 3068 - protein, 119 aa, synthetic construct
EVQLVESGGGVVQPGGSLRLSCAASGRMHSINAMAWFRQVPGKEREFVALISWGVGITYYEDSMKGRFTISRDNAKNTMYLQMNSLRPEDTALYSCAAESYGSSWYDSWGQGTLVTVSS

SEQ ID NO: 3069 - protein, 119 aa, synthetic construct
EVQLVESGGGVVQPGGSLRLSCAASGRMHSINAMAWFRQVPGKEREFVALISWGQGITYYEDSMKGRFTISRDNAKNTMYLQMNSLRPEDTALYFCAAESYGSSWYDSWGQGTLVTVSS

SEQ ID NO: 3070 - protein, 119 aa, synthetic construct
EVQLVESGGGVVQPGGSLRLSCAASGRMHSINAMAWFRQVPGKEREFVALISWGIGITYYEDSMKGRFTISRDNAKNTMYLQMNSLRPEDTALYFCAAESYGSSWYDSWGQGTLVTVSS

SEQ ID NO: 3071 - protein, 119 aa, synthetic construct
EVQLVESGGGVVQPGGSLRLSCAASGRMHSINAMAWFRQVPGKEREFVALISWGLGITYYEDSMKGRFTISRDNAKNTMYLQMNSLRPEDTALYFCAAESYGSSWYDSWGQGTLVTVSS

SEQ ID NO: 3072 - protein, 119 aa, synthetic construct
EVQLVESGGGVVQPGGSLRLSCAASGRMHSINAMAWFRQVPGKEREFVALISWGRGITYYEDSMKGRFTISRDNAKNTMYLQMNSLRPEDTALYFCAAESYGSSWYDSWGQGTLVTVSS

SEQ ID NO: 3073 - protein, 119 aa, synthetic construct
EVQLVESGGGVVQPGGSLRLSCAASGRMHSINAMAWFRQVPGKEREFVALISWGYGITYYEDSMKGRFTISRDNAKNTMYLQMNSLRPEDTALYFCAAESYGSSWYDSWGQGTLVTVSS

SEQ ID NO: 3074 - protein, 119 aa, synthetic construct
EVQLVESGGGVVQPGGSLRLSCAASGRMHSINAMAWFRQVPGKEREFVALISWGNQITYYEDSMKGRFTISRDNAKNTMYLQMNSLRPEDTALYFCAAESYGSSWYDSWGQGTLVTVSS

SEQ ID NO: 3075 - protein, 119 aa, synthetic construct
EVQLVESGGGVVQPGGSLRLSCAASGRMHSINAMTWFRQVPGKEREFVALISWGGGITYYEDSMKGRFTISRDNAKNTMYLQMNSLRPEDTALYFCAAESYGSSWYDSWGQGTLVTVSS

SEQ ID NO: 3076 - protein, 119 aa, synthetic construct
EVQLVESGGGVVQPGGSLRLSCAASGRMHSINAMAWFRQVPGKEREFVALISWGNFITYYEDSMKGRFTISRDNAKNTMYLQMNSLRPEDTALYFCAAESYGSSWYDSWGQGTLVTVSS

SEQ ID NO: 3077 - protein, 119 aa, synthetic construct
EVQLVESGGGVVQPGGSLRLSCAASGRMHSINAMAWFRQVPGKEREFVALISWGNSITYYEDSMKGRFTISRDNAKNTMYLQMNSLRPEDTALYFCAAESYGSSWYDSWGQGTLVTVSS

SEQ ID NO: 3078 - protein, 119 aa, synthetic construct
EVQLVESGGGVVQPGGSLRLSCAASGRMHSINAMAWFRQVPGKEREFVALISWGNIITYYEDSMKGRFTISRDNAKNTMYLQMNSLRPEDTALYFCAAESYGSSWYDSWGQGTLVTVSS

SEQ ID NO: 3079 - protein, 119 aa, synthetic construct
EVQLVESGGGVVQPGGSLRLSCAASGRMHSINAMAWFRQVPGKEREFVALISWGNHITYYEDSMKGRFTISRDNAKNTMYLQMNSLRPEDTALYFCAAESYGSSWYDSWGQGTLVTVSS

SEQ ID NO: 3080 - protein, 119 aa, synthetic construct
EVQLVESGGGVVQPGGSLRLSCAASGRMHSINAMAWFRQVPGKEREFVALISWGNRITYYEDSMKGRFTISRDNAKNTMYLQMNSLRPEDTALYFCAAESYGSSWYDSWGQGTLVTVSS

SEQ ID NO: 3081 - protein, 119 aa, synthetic construct
EVQLVESGGGVVQPGGSLRLSCAASGRMHSINAMAWFRQVPGKEREFVALISWGNEITYYEDSMKGRFTISRDNAKNTMYLQMNSLRPEDTALYFCAAESYGSSWYDSWGQGTLVTVSS

SEQ ID NO: 3082 - protein, 119 aa, synthetic construct
EVQLVESGGGVVQPGGSLRLSCAASGRMHSINAMAWFRQVPGKEREFVALISWGNVITYYEDSMKGRFTISRDNAKNTMYLQMNSLRPEDTALYFCAAESYGSSWYDSWGQGTLVTVSS

SEQ ID NO: 3083 - protein, 119 aa, synthetic construct
EVQLVESGGGVVQPGGSLRLSCAASGRMHSINAMAWFRQVPGKEREFVALISWGNPITYYEDSMKGRFTISRDNAKNTMYLQMNSLRPEDTALYFCAAESYGSSWYDSWGQGTLVTVSS

SEQ ID NO: 3084 - protein, 119 aa, synthetic construct
EVQLVESGGGVVQPGGSLRLSCAASGRMHSINAMAWFRQVPGKEREFVALISWGNLITYYEDSMKGRFTISRDNAKNTMYLQMNSLRPEDTALYFCAAESYGSSWYDSWGQGTLVTVSS

SEQ ID NO: 3085 - protein, 119 aa, synthetic construct
EVQLVESGGGVVQPGGSLRLSCAASGRMHSINAMAWFRQVPGKEREFVALISWGNDITYYEDSMKGRFTISRDNAKNTMYLQMNSLRPEDTALYFCAAESYGSSWYDSWGQGTLVTVSS

SEQ ID NO: 3086 - protein, 119 aa, synthetic construct
EVQLVESGGGVVQPGGSLRLSCAASGRMHSINAMAWFRQVPGKEREFVALISWGNTITYYEDSMKGRFTISRDNAKNTMYLQMNSLRPEDTALYFCAAESYGSSWYDSWGQGTLVTVSS

SEQ ID NO: 3087 - protein, 119 aa, synthetic construct
EVQLVESGGGVVQPGGSLRLSCAASGRMHSINAMAWFRQVPGKEREFVALISWGNAITYYEDSMKGRFTISRDNAKNTMYLQMNSLRPEDTALYFCAAESYGSSWYDSWGQGTLVTVSS

SEQ ID NO: 3088 - protein, 119 aa, synthetic construct
EVQLVESGGGVVQPGGSLRLSCAASGRMHSINAMAWFRQVPGKEREFVALISWGNGQTYYEDSMKGRFTISRDNAKNTMYLQMNSLRPEDTALYFCAAESYGSSWYDSWGQGTLVTVSS

SEQ ID NO: 3089 - protein, 119 aa, synthetic construct
EVQLVESGGGVVQPGGSLRLSCAASGRMHSINAMAWFRQVPGKEREFVALISWGNGTTYYEDSMKGRFTISRDNAKNTMYLQMNSLRPEDTALYFCAAESYGSSWYDSWGQGTLVTVSS

SEQ ID NO: 3090 - protein, 119 aa, synthetic construct
EVQLVESGGGVVQPGGSLRLSCAASGRMHSINAMAWFRQVPGKEREFVALISWGNGLTYYEDSMKGRFTISRDNAKNTMYLQMNSLRPEDTALYFCAAESYGSSWYDSWGQGTLVTVSS

SEQ ID NO: 3091 - protein, 119 aa, synthetic construct
EVQLVESGGGVVQPGGSLRLSCAASGRMHSINAMAWFRQVPGKEREFVALISWGNGPTYYEDSMKGRFTISRDNAKNTMYLQMNSLRPEDTALYFCAAESYGSSWYDSWGQGTLVTVSS

SEQ ID NO: 3092 - protein, 119 aa, synthetic construct
EVQLVESGGGVVQPGGSLRLSCAASGRMHSINAMAWFRQVPGKEREFVALISWGNGVTYYEDSMKGRFTISRDNAKNTMYLQMNSLRPEDTALYFCAAESYGSSWYDSWGQGTLVTVSS

SEQ ID NO: 3093 - protein, 119 aa, synthetic construct
EVQLVESGGGVVQPGGSLRLSCAASGRMHSINAMAWFRQVPGKEREFVALISWGNGYTYYEDSMKGRFTISRDNAKNTMYLQMNSLRPEDTALYFCAAESYGSSWYDSWGQGTLVTVSS

SEQ ID NO: 3094 - protein, 119 aa, synthetic construct
EVQLVESGGGVVQPGGSLRLSCAASGRMHSINAMAWFRQVPGKEREFVALISWGNGHTYYEDSMKGRFTISRDNAKNTMYLQMNSLRPEDTALYFCAAESYGSSWYDSWGQGTLVTVSS

SEQ ID NO: 3095 - protein, 119 aa, synthetic construct
EVQLVESGGGVVQPGGSLRLSCAASGRMHSINAMAWFRQVPGKEREFVALISWGNGDTYYEDSMKGRFTISRDNAKNTMYLQMNSLRPEDTALYFCAAESYGSSWYDSWGQGTLVTVSS

SEQ ID NO: 3096 - protein, 119 aa, synthetic construct
EVQLVESGGGVVQPGGSLRLSCAASGRMHSINAMAWFRQVPGKEREFVALISWGNGRTYYEDSMKGRFTISRDNAKNTMYLQMNSLRPEDTALYFCAAESYGSSWYDSWGQGTLVTVSS

SEQ ID NO: 3097 - protein, 119 aa, synthetic construct
EVQLVESGGGVVQPGGSLRLSCAASGRMHSINAMAWFRQVPGKEREFVALISWGNGETYYEDSMKGRFTISRDNAKNTMYLQMNSLRPEDTALYFCAAESYGSSWYDSWGQGTLVTVSS

SEQ ID NO: 3098 - protein, 119 aa, synthetic construct
EVQLVESGGGVVQPGGSLRLSCAASGRMHSINAMAWFRQVPGKEREFVALISWGNGATYYEDSMKGRFTISRDNAKNTMYLQMNSLRPEDTALYFCAAESYGSSWYDSWGQGTLVTVSS

SEQ ID NO: 3099 - protein, 119 aa, synthetic construct
EVQLVESGGGVVQPGGSLRLSCAASGRMHSINAMAWFRQVPGKEREFVALISWGNGGTYYEDSMKGRFTISRDNAENTMYLQMNSLRPEDTALYFCAAESYGSSWYDSWGQGTLVTVSS

SEQ ID NO: 3100 - protein, 119 aa, synthetic construct
EVQLVESGGGVVQPGGSLRLSCAASGRMHSINAMAWFRQVPGKEREFVALISWGNGFTYYEDSMKGRFTISRDNAKNTMYLQMNSLRPEDTALYFCAAESYGSSWYDSWGQGTLVTVSS

SEQ ID NO: 3101 - protein, 119 aa, synthetic construct
EVQLVESGGGVVQPGGSLRLSCAASGRMHSINAMAWFRQVPGKEREFVALISWGNGSTYYEDSMKGRFTISRDNAKNTMYLQMNSLRPEDTALYFCAAESYGSSWYDSWGQGTLVTVSS

SEQ ID NO: 3102 - protein, 119 aa, synthetic construct
EVQLVESGGGVVQPGGSLRLSCAASGRMHSINAMAWFRQVPGKEREFVALISWGNGKTYYEDSMKGRFTISRDNAKNTMYLQMNSLRPEDTALYFCAAESYGSSWYDSWGQGTLVTVSS

SEQ ID NO: 3103 - protein, 119 aa, synthetic construct
EVQLVESGGGVVQPGGSLRLSCAASGRMHSINAMAWFRQVPGKEREFVALISWGNGGTYYEDSMKGRFTISRDNAKNTMYLQMNSLRPEDTALYFCAAESYGSSWYDSWGQGTLVTVSS

SEQ ID NO: 3104 - protein, 119 aa, synthetic construct
EVQLVESGGGVVQPGGSLRLSCAASGRMHSINAMAWFRQVPGKEREFVALISWGNGILYYEDSMKGRFTISRDNAKNTMYLQMNSLRPEDTALYFCAAESYGSSWYDSWGQGTLVTVSS

SEQ ID NO: 3105 - protein, 119 aa, synthetic construct
EVQLVESGGGVVQPGGSLRLSCAASGRMHSINAMAWFRQVPGKEREFVALISWGNGIDYYEDSMKGRFTISRDNAKNTMYLQMNSLRPEDTALYFCAAESYGSSWYDSWGQGTLVTVSS

SEQ ID NO: 3106 - protein, 119 aa, synthetic construct
EVQLVESGGGVVQPGGSLRLSCAASGRMHSINAMAWFRQVPGKEREFVALISWGNGIQYYEDSMKGRFTISRDNAKNTMYLQMNSLRPEDTALYFCAAESYGSSWYDSWGQGTLVTVSS

SEQ ID NO: 3107 - protein, 119 aa, synthetic construct
EVQLVESGGGVVQPGGSLRLSCAASGRMHSINAMAWFRQVPGKEREFVALISWGNGIIYYEDSMKGRFTISRDNAKNTMYLQMNSLRPEDTALYFCAAESYGSSWYDSWGQGTLVTVSS

SEQ ID NO: 3108 - protein, 119 aa, synthetic construct
EVQLVESGGGVVQPGGSLRLSCAASGRMHSINAMAWFRQVPGKEREFVALISWGNGISYYEDSMKGRFTISRDNAKNTMYLQMNSLRPEDTALYFCAAESYGSSWYDSWGQGTLVTVSS

SEQ ID NO: 3109 - protein, 119 aa, synthetic construct
EVQLVESGGGVVQPGGSLRLSCAASGRMHSINAMAWFRQVPGKEREFVALISWGNGIGYYEDSMKGRFTISRDNAKNTMYLQMNSLRPEDTALYFCAAESYGSSWYDSWGQGTLVTVSS

SEQ ID NO: 3110 - protein, 119 aa, synthetic construct
EVQLVESGGGVVQPGGSLRLSCAASGRMHSINAMAWFRQVPGKEREFVALISWGNGIFYYEDSMKGRFTISRDNAKNTMYLQMNSLRPEDTALYFCAAESYGSSWYDSWGQGTLVTVSS

SEQ ID NO: 3111 - protein, 119 aa, synthetic construct
EVQLVESGGGVVQPGGSLRLSCAASGRMHSINAMAWFRQVPGKEREFVALISWGNGIEYYEDSMKGRFTISRDNAKNTMYLQMNSLRPEDTALYFCAAESYGSSWYDSWGQGTLVTVSS

SEQ ID NO: 3112 - protein, 119 aa, synthetic construct
EVQLVESGGGVVQPGGSLRLSCAASGRMHSINAMAWFRQVPGKEREFVALISWGNGIAYYEDSMKGRFTISRDNAKNTMYLQMNSLRPEDTALYFCAAESYGSSWYDSWGQGTLVTVSS

SEQ ID NO: 3113 - protein, 119 aa, synthetic construct
EVQLVESGGGVVQPGGSLRLSCAASGRMHSINAMAWFRQVPGKEREFVALISWGNGIYYYEDSMKGRFTISRDNAKNTMYLQMNSLRPEDTALYFCAAESYGSSWYDSWGQGTLVTVSS

SEQ ID NO: 3114 - protein, 119 aa, synthetic construct
EVQLVESGGGVVQPGGSLRLSCAASGRMHSINAMAWFRQVPGKEREFVALISWGNGIPYYEDSMKGRFTISRDNAKNTMYLQMNSLRPEDTALYFCAAESYGSSWYDSWGQGTLVTVSS

SEQ ID NO: 3115 - protein, 119 aa, synthetic construct
EVQLVESGGGVVQPGGSLRLSCAASGRMHSINAMAWFRQVPGKEREFVALISWGNGIVYYEDSMKGRFTISRDNAKNTMYLQMNSLRPEDTALYFCAAESYGSSWYDSWGQGTLVTVSS

SEQ ID NO: 3116 - protein, 119 aa, synthetic construct
EVQLVESGGGVVQPGGSLRLSCAASGRMHSINAMAWFRQVPGKEREFVALISWGNGIKYYEDSMKGRFTISRDNAKNTMYLQMNSLRPEDTALYFCAAESYGSSWYDSWGQGTLVTVSS

SEQ ID NO: 3117 - protein, 119 aa, synthetic construct
EVQLVESGGGVVQPGGSLRLSCAASGRMHSINAMAWFRQVPGKEREFVALISWGNGITPYEDSMKGRFTISRDNAKNTMYLQMNSLRPEDTALYFCAAESYGSSWYDSWGQGTLVTVSS

SEQ ID NO: 3118 - protein, 119 aa, synthetic construct
EVQLVESGGGVVQPGGSLRLSCAASGRMHSINAMAWFRQVPGKEREFVALISWGNGITRYEDSMKGRFTISRDNAKNTMYLQMNSLRPEDTALYFCAAESYGSSWYDSWGQGTLVTVSS

SEQ ID NO: 3119 - protein, 119 aa, synthetic construct
EVQLVESGGGVVQPGGSLRLSCAASGRMHSINAMAWFRQVPGKEREFVALISWGNGITTYEDSMKGRFTISRDNAKNTMYLQMNSLRPEDTALYFCAAESYGSSWYDSWGQGTLVTVSS

SEQ ID NO: 3120 - protein, 119 aa, synthetic construct
EVQLVESGGGVVQPGGSLRLSCAASGRMHSINAMAWFRQVPGKEREFVALISWGNGITGYEDSMKGRFTISRDNAKNTMYLQMNSLRPEDTALYFCAAESYGSSWYDSWGQGTLVTVSS

SEQ ID NO: 3121 - protein, 119 aa, synthetic construct
EVQLVESGGGVVQPGGSLRLSCAASGRMHSINAMAWFRQVPGKEREFVALISWGNGITAYEDSMKGRFTISRDNAKNTMYLQMNSLRPEDTALYFCAAESYGSSWYDSWGQGTLVTVSS

SEQ ID NO: 3122 - protein, 119 aa, synthetic construct
EVQLVESGGGVVQPGGSLRLSCAASGRMHSINAMAWFRQVPGKEREFVALISWGNGITHYEDSMKGRFTISRDNAKNTMYLQMNSLRPEDTALYFCAAESYGSSWYDSWGQGTLVTVSS

SEQ ID NO: 3123 - protein, 119 aa, synthetic construct
EVQLVESGGGVVQPGGSLRLSCAASGRMHSINAMAWFRQVPGKEREFVALISWGNGITSYEDSMKGRFTISRDNAKNTMYLQMNSLRPEDTALYFCAAESYGSSWYDSWGQGTLVTVSS

SEQ ID NO: 3124 - protein, 119 aa, synthetic construct
EVQLVESGGGVVQPGGSLRLSCAASGRMHSINAMAWFRQVPGKEREFVALISWGNGITQYEDSMKGRFTISRDNAKNTMYLQMNSLRPEDTALYFCAAESYGSSWYDSWGQGTLVTVSS

SEQ ID NO: 3125 - protein, 119 aa, synthetic construct
EVQLVESGGGVVQPGGSLRLSCAASGRMHSINAMAWFRQVPGKEREFVALISWGNGITDYEDSMKGRFTISRDNAKNTMYLQMNSLRPEDTALYFCAAESYGSSWYDSWGQGTLVTVSS

SEQ ID NO: 3126 - protein, 119 aa, synthetic construct
EVQLVESGGGVVQPGGSLRLSCAASGRMHSINAMAWFRQVPGKEREFVALISWGNGITEYEDSMKGRFTISRDNAKNTMYLQMNSLRPEDTALYFCAAESYGSSWYDSWGQGTLVTVSS

SEQ ID NO: 3127 - protein, 119 aa, synthetic construct
EVQLVESGGGVVQPGGSLRLSCAASGRMHSINAMAWFRQVPGKEREFVALISWGNGITLYEDSMKGRFTISRDNAKNTMYLQMNSLRPEDTALYFCAAESYGSSWYDSWGQGTLVTVSS

SEQ ID NO: 3128 - protein, 119 aa, synthetic construct
EVQLVESGGGVVQPGGSLRLSCAASGRMHSINAMAWFRQVPGKEREFVALISWGNGITKYEDSMKGRFTISRDNAKNTMYLQMNSLRPEDTALYFCAAESYGSSWYDSWGQGTLVTVSS

SEQ ID NO: 3129 - protein, 119 aa, synthetic construct
EVQLVESGGGVVQPGGSLRLSCAASGRMHSINAMAWFRQVPGKEREFVALISWGNGITIYEDSMKGRFTISRDNAKNTMYLQMNSLRPEDTALYFCAAESYGSSWYDSWGQGTLVTVSS

SEQ ID NO: 3130 - protein, 119 aa, synthetic construct
EVQLVESGGGVVQPGGSLRLSCAASGRMHSINAMAWFRQVPGKEREFVALISWGNGITFYEDSMKGRFTISRDNAKNTMYLQMNSLRPEDTALYFCAAESYGSSWYDSWGQGTLVTVSS

SEQ ID NO: 3131 - protein, 119 aa, synthetic construct
EVQLVESGGGVVQPGGSLRLSCAASGRMHSINAMAWFRQVPGKEREFVALISWGNGITVYEDSMKGRFTISRDNAKNTMYLQMNSLRPEDTALYFCAAESYGSSWYDSWGQGTLVTVSS

SEQ ID NO: 3132 - protein, 119 aa, synthetic construct
EVQLVESGGGVVQPGGSLRLSCAASGRMHSINAMAWFRQVPGKEREFVALISWGNGITYYKDSMKGRFTISRDNAKNTMYLQMNSLRPEDTALYFCAAESYGSSWYDSWGQGTLVTVSS

SEQ ID NO: 3133 - protein, 119 aa, synthetic construct
EVQLVESGGGVVQPGGSLRLSCAASGRMHSINAMAWFRQVPGKEREFVALISWGNGITYYPDSMKGRFTISRDNAKNTMYLQMNSLRPEDTALYFCAAESYGSSWYDSWGQGTLVTVSS

SEQ ID NO: 3134 - protein, 119 aa, synthetic construct
EVQLVESGGGVVQPGGSLRLSCAASGRMHSINAMAWFRQVPGKEREFVALISWGNGITYYLDSMKGRFTISRDNAKNTMYLQMNSLRPEDTALYFCAAESYGSSWYDSWGQGTLVTVSS

SEQ ID NO: 3135 - protein, 119 aa, synthetic construct
EVQLVESGGGVVQPGGSLRLSCAASGRMHSINAMAWFRQVPGKEREFVALISWGNGITYYIDSMKGRFTISRDNAKNTMYLQMNSLRPEDTALYFCAAESYGSSWYDSWGQGTLVTVSS

SEQ ID NO: 3136 - protein, 119 aa, synthetic construct
EVQLVESGGGVVQPGGSLRLSCAASGRMHSINAMAWFRQVPGKEREFVALISWGNGITYYFDSMKGRFTISRDNAKNTMYLQMNSLRPEDTALYFCAAESYGSSWYDSWGQGTLVTVSS

SEQ ID NO: 3137 - protein, 119 aa, synthetic construct
EVQLVESGGGVVQPGGSLRLSCAASGRMHSINAMAWFRQVPGKEREFVALISWGNGITYYVDSMKGRFTISRDNAKNTMYLQMNSLRPEDTALYFCAAESYGSSWYDSWGQGTLVTVSS

SEQ ID NO: 3138 - protein, 119 aa, synthetic construct
EVQLVESGGGVVQPGGSLRLSCAASGRMHSINAMAWFRQVPGKEREFVALISWGNGITYYTDSMKGRFTISRDNAKNTMYLQMNSLRPEDTALYFCAAESYGSSWYDSWGQGTLVTVSS

SEQ ID NO: 3139 - protein, 119 aa, synthetic construct
EVQLVESGGGVVQPGGSLRLSCAASGRMHSINAMAWFRQVPGKEREFVALISWGNGITYYGDSMKGRFTISRDNAKNTMYLQMNSLRPEDTALYFCAAESYGSSWYDSWGQGTLVTVSS

SEQ ID NO: 3140 - protein, 119 aa, synthetic construct
EVQLVESGGGVVQPGGSLRLSCAASGRMHSINAMAWFRQVPGKEREFVALISWGNGITYYYDSMKGRFTISRDNAKNTMYLQMNSLRPEDTALYFCAAESYGSSWYDSWGQGTLVTVSS

SEQ ID NO: 3141 - protein, 119 aa, synthetic construct
EVQLVESGGGVVQPGGSLRLSCAASGRMHSINAMAWFRQVPGKEREFVALISWGNGITYYHDSMKGRFTISRDNAKNTMYLQMNSLRPEDTALYFCAAESYGSSWYDSWGQGTLVTVSS

SEQ ID NO: 3142 - protein, 119 aa, synthetic construct
EVQLVESGGGVVQPGGSLRLSCAASGRMHSINAMAWFRQVPGKEREFVALISWGNGITYYRDSMKGRFTISRDNAKNTMYLQMNSLRPEDTALYFCAAESYGSSWYDSWGQGTLVTVSS

SEQ ID NO: 3143 - protein, 119 aa, synthetic construct
EVQLVESGGGVVQPGGSLRLSCAASGRMHSINAMAWFRQVPGKEREFVALISWGNGITYYDDSMKGRFTISRDNAKNTMYLQMNSLRPEDTALYFCAAESYGSSWYDSWGQGTLVTVSS

SEQ ID NO: 3144 - protein, 119 aa, synthetic construct
EVQLVESGGGVVQPGGSLRLSCAASGRMHSINAMAWFRQVPGKEREFVALISWGNGITYYEDSIKGRFTISRDNAKNTMYLQMNSLRPEDTALYFCAAESYGSSWYDSWGQGTLVTVSS

SEQ ID NO: 3145 - protein, 119 aa, synthetic construct
EVQLVESGGGVVQPGGSLRLSCAASGRMHSINAMAWFRQVPGKEREFVALISWGNGITYYEDSSKGRFTISRDNAKNTMYLQMNSLRPEDTALYFCAAESYGSSWYDSWGQGTLVTVSS

SEQ ID NO: 3146 - protein, 119 aa, synthetic construct
EVQLVESGGGVVQPGGSLRLSCAASGRMHSINAMAWFRQVPGKEREFVALISWGNGITYYEDSQKGRFTISRDNAKNTMYLQMNSLRPEDTALYFCAAESYGSSWYDSWGQGTLVTVSS

SEQ ID NO: 3147 - protein, 119 aa, synthetic construct
EVQLVESGGGVVQPGGSLRLSCAASGRMHSINAMAWFRQVPGKEREFVALISWGNGITYYEDSYKGRFTISRDNAKNTMYLQMNSLRPEDTALYFCAAESYGSSWYDSWGQGTLVTVSS

SEQ ID NO: 3148 - protein, 119 aa, synthetic construct
EVQLVESGGGVVQPGGSLRLSCAASGRMHSINAMAWFRQVPGKEREFVALISWGNGITYYEDSDKGRFTISRDNAKNTMYLQMNSLRPEDTALYFCAAESYGSSWYDSWGQGTLVTVSS

SEQ ID NO: 3149 - protein, 119 aa, synthetic construct
EVQLVESGGGVVQPGGSLRLSCAASGRMHSINAMAWFRQVPGKEREFVALISWGNGITYYEDSLKGRFTISRDNAKNTMYLQMNSLRPEDTALYFCAAESYGSSWYDSWGQGTLVTVSS

SEQ ID NO: 3150 - protein, 119 aa, synthetic construct
EVQLVESGGGVVQPGGSLRLSCAASGRMHSINAMAWFRQVPGKEREFVALISWGNGITYYEDSTKGRFTISRDNAKNTMYLQMNSLRPEDTALYFCAAESYGSSWYDSWGQGTLVTVSS

SEQ ID NO: 3151 - protein, 119 aa, synthetic construct
EVQLVESGGGVVQPGGSLRLSCAASGRMHSINAMAWFRQVPGKEREFVALISWGNGITYYEDSEKGRFTISRDNAKNTMYLQMNSLRPEDTALYFCAAESYGSSWYDSWGQGTLVTVSS

SEQ ID NO: 3152 - protein, 119 aa, synthetic construct
EVQLVESGGGVVQPGGSLRLSCAASGRMHSINAMAWFRQVPGKEREFVALISWGNGITYYEDSGKGRFTISRDNAKNTMYLQMNSLRPEDTALYFCAAESYGSSWYDSWGQGTLVTVSS

SEQ ID NO: 3153 - protein, 119 aa, synthetic construct
EVQLVESGGGVVQPGGSLRLSCAASGRMHSINAMAWFRQVPGKEREFVALISWGNGITYYEDSAKGRFTISRDNAKNTMYLQMNSLRPEDTALYFCAAESYGSSWYDSWGQGTLVTVSS

SEQ ID NO: 3154 - protein, 119 aa, synthetic construct
EVQLVESGGGVVQPGGSLRLSCAASGRMHSINAMAWFRQVPGKEREFVALISWGNGITYYEDSRKGRFTISRDNAKNTMYLQMNSLRPEDTALYFCAAESYGSSWYDSWGQGTLVTVSS

SEQ ID NO: 3155 - protein, 119 aa, synthetic construct
EVQLVESGGGVVQPGGSLRLSCAASGRMHSINAMAWFRQVPGKEREFVALISWGNGITYYEDSKKGRFTISRDNAKNTMYLQMNSLRPEDTALYFCAAESYGSSWYDSWGQGTLVTVSS

SEQ ID NO: 3156 - protein, 119 aa, synthetic construct
EVQLVESGGGVVQPGGSLRLSCAASGRMHSINAMAWFRQVPGKEREFVALISWGNGITYYEDSPKGRFTISRDNAKNTMYLQMNSLRPEDTALYFCAAESYGSSWYDSWGQGTLVTVSS

SEQ ID NO: 3157 - protein, 119 aa, synthetic construct
EVQLVESGGGVVQPGGSLRLSCAASGRMHSINAMAWFRQVPGKEREFVALISWGNGITYYEDSMKGRFTISRDEAKNTMYLQMNSLRPEDTALYFCAAESYGSSWYDSWGQGTLVTVSS

SEQ ID NO: 3158 - protein, 119 aa, synthetic construct
EVQLVESGGGVVQPGGSLRLSCAASGRMHSINAMAWFRQVPGKEREFVALISWGNGITYYEDSMKGRFTISRDTAKNTMYLQMNSLRPEDTALYFCAAESYGSSWYDSWGQGTLVTVSS

SEQ ID NO: 3159 - protein, 119 aa, synthetic construct
EVQLVESGGGVVQPGGSLRLSCAASGRMHSINAMAWFRQVPGKEREFVALISWGNGITYYEDSMKGRFTISRDKAKNTMYLQMNSLRPEDTALYFCAAESYGSSWYDSWGQGTLVTVSS

SEQ ID NO: 3160 - protein, 119 aa, synthetic construct
EVQLVESGGGVVQPGGSLRLSCAASGRMHSINAMAWFRQVPGKEREFVALISWGNGITYYEDSMKGRFTISRDHAKNTMYLQMNSLRPEDTALYFCAAESYGSSWYDSWGQGTLVTVSS

SEQ ID NO: 3161 - protein, 119 aa, synthetic construct
EVQLVESGGGVVQPGGSLRLSCAASGRMHSINAMAWFRQVPGKEREFVALISWGNGITYYEDSMKGRFTISRDRAKNTMYLQMNSLRPEDTALYFCAAESYGSSWYDSWGQGTLVTVSS

SEQ ID NO: 3162 - protein, 119 aa, synthetic construct
EVQLVESGGGVVQPGGSLRLSCAASGRMHSINAMAWFRQVPGKEREFVALISWGNGITYYEDSMKGRFTISRDIAKNTMYLQMNSLRPEDTALYFCAAESYGSSWYDSWGQGTLVTVSS

SEQ ID NO: 3163 - protein, 119 aa, synthetic construct
EVQLVESGGGVVQPGGSLRLSCAASGRMHSINAMAWFRQVPGKEREFVALISWGNGITYYEDSMKGRFTISRDAAKNTMYLQMNSLRPEDTALYFCAAESYGSSWYDSWGQGTLVTVSS

SEQ ID NO: 3164 - protein, 119 aa, synthetic construct
EVQLVESGGGVVQPGGSLRLSCAASGRMHSINAMAWFRQVPGKEREFVALISWGNGITYYEDSMKGRFTISRDPAKNTMYLQMNSLRPEDTALYFCAAESYGSSWYDSWGQGTLVTVSS

SEQ ID NO: 3165 - protein, 119 aa, synthetic construct
EVQLVESGGGVVQPGGSLRLSCAASGRMHSINAMAWFRQVPGKEREFVALISWGNGITYYEDSMKGRFTISRDVAKNTMYLQMNSLRPEDTALYFCAAESYGSSWYDSWGQGTLVTVSS

SEQ ID NO: 3166 - protein, 119 aa, synthetic construct
EVQLVESGGGVVQPGGSLRLSCAASGRMHSINAMAWFRQVPGKEREFVALISWGNGITYYEDSMKGRFTISRDYAKNTMYLQMNSLRPEDTALYFCAAESYGSSWYDSWGQGTLVTVSS

SEQ ID NO: 3167 - protein, 119 aa, synthetic construct
EVQLVESGGGVVQPGGSLRLSCAASGRMHSINAMAWFRQVPGKEREFVALISWGNGITYYEDSMKGRFTISRDGAKNTMYLQMNSLRPEDTALYFCAAESYGSSWYDSWGQGTLVTVSS

SEQ ID NO: 3168 - protein, 119 aa, synthetic construct
EVQLVESGGGVVQPGGSLRLSCAASGRMHSINAMAWFRQVPGKEREFVALISWGNGITYYEDSMKGRFTISRDQAKNTMYLQMNSLRPEDTALYFCAAESYGSSWYDSWGQGTLVTVSS

SEQ ID NO: 3169 - protein, 119 aa, synthetic construct
EVQLVESGGGVVQPGGSLRLSCAASGRMHSINAMAWFRQVPGKEREFVALISWGNGITYYEDSMKGRFTISRDLAKNTMYLQMNSLRPEDTALYFCAAESYGSSWYDSWGQGTLVTVSS

SEQ ID NO: 3170 - protein, 119 aa, synthetic construct
EVQLVESGGGVVQPGGSLRLSCAASGRMHSINAMAWFRQVPGKEREFVALISWGNGITYYEDSMKGRFTISRDFAKNTMYLQMNSLRPEDTALYFCAAESYGSSWYDSWGQGTLVTVSS

SEQ ID NO: 3171 - protein, 119 aa, synthetic construct
EVQLVESGGGVVQPGGSLRLSCAASGRMHSINAMAWFRQVPGKEREFVALISWGNGITYYEDSMKGRFTISRDNAKNTSYLQMNSLRPEDTALYFCAAESYGSSWYDSWGQGTLVTVSS

SEQ ID NO: 3172 - protein, 119 aa, synthetic construct
EVQLVESGGGVVQPGGSLRLSCAASGRMHSINAMAWFRQVPGKEREFVALISWGNGITYYEDSMKGRFTISRDNAKNTRYLQMNSLRPEDTALYFCAAESYGSSWYDSWGQGTLVTVSS

SEQ ID NO: 3173 - protein, 119 aa, synthetic construct
EVQLVESGGGVVQPGGSLRLSCAASGRMHSINAMAWFRQVPGKEREFVALISWGNGITYYEDSMKGRFTISRDNAKNTTYLQMNSLRPEDTALYFCAAESYGSSWYDSWGQGTLVTVSS

SEQ ID NO: 3174 - protein, 119 aa, synthetic construct
EVQLVESGGGVVQPGGSLRLSCAASGRMHSINAMAWFRQVPGKEREFVALISWGNGITYYEDSMKGRFTISRDNAKNTIYLQMNSLRPEDTALYFCAAESYGSSWYDSWGQGTLVTVSS

SEQ ID NO: 3175 - protein, 119 aa, synthetic construct
EVQLVESGGGVVQPGGSLRLSCAASGRMHSINAMAWFRQVPGKEREFVALISWGNGITYYEDSMKGRFTISRDNAKNTKYLQMNSLRPEDTALYFCAAESYGSSWYDSWGQGTLVTVSS

SEQ ID NO: 3176 - protein, 119 aa, synthetic construct
EVQLVESGGGVVQPGGSLRLSCAASGRMHSINAMAWFRQVPGKEREFVALISWGNGITYYEDSMKGRFTISRDNAKNTYYLQMNSLRPEDTALYFCAAESYGSSWYDSWGQGTLVTVSS

SEQ ID NO: 3177 - protein, 119 aa, synthetic construct
EVQLVESGGGVVQPGGSLRLSCAASGRMHSINAMAWFRQVPGKEREFVALISWGNGITYYEDSMKGRFTISRDNAKNTEYLQMNSLRPEDTALYFCAAESYGSSWYDSWGQGTLVTVSS

SEQ ID NO: 3178 - protein, 119 aa, synthetic construct
EVQLVESGGGVVQPGGSLRLSCAASGRMHSINAMAWFRQVPGKEREFVALISWGNGITYYEDSMKGRFTISRDNAKNTGYLQMNSLRPEDTALYFCAAESYGSSWYDSWGQGTLVTVSS

SEQ ID NO: 3179 - protein, 119 aa, synthetic construct
EVQLVESGGGVVQPGGSLRLSCAASGRMHSINAMAWFRQVPGKEREFVALISWGNGITYYEDSMKGRFTISRDNAKNTHYLQMNSLRPEDTALYFCAAESYGSSWYDSWGQGTLVTVSS

SEQ ID NO: 3180 - protein, 119 aa, synthetic construct
EVQLVESGGGVVQPGGSLRLSCAASGRMHSINAMAWFRQVPGKEREFVALISWGNGITYYEDSMKGRFTISRDNAKNTAYLQMNSLRPEDTALYFCAAESYGSSWYDSWGQGTLVTVSS

SEQ ID NO: 3181 - protein, 119 aa, synthetic construct
EVQLVESGGGVVQPGGSLRLSCAASGRMHSINAMAWFRQVPGKEREFVALISWGNGITYYEDSMKGRFTISRDNAKNTMYLQMNSLRPEDTALYFCAAESYGDSWYDSWGQGTLVTVSS

SEQ ID NO: 3182 - protein, 119 aa, synthetic construct
EVQLVESGGGVVQPGGSLRLSCAASGRMHSINAMAWFRQVPGKEREFVALISWGNGITYYEDSMKGRFTISRDNAKNTFYLQMNSLRPEDTALYFCAAESYGSSWYDSWGQGTLVTVSS

SEQ ID NO: 3183 - protein, 119 aa, synthetic construct
EVQLVESGGGVVQPGGSLRLSCAASGRMHSINAMAWFRQVPGKEREFVALISWGNGITYYEDSMKGRFTISRDNAKNTPYLQMNSLRPEDTALYFCAAESYGSSWYDSWGQGTLVTVSS

SEQ ID NO: 3184 - protein, 119 aa, synthetic construct
EVQLVESGGGVVQPGGSLRLSCAASGRMHSINAMAWFRQVPGKEREFVALISWGNGITYYEDSMKGRFTISRDNAKNTMYLQMNSLRPEDTALYECAAESYGSSWYDSWGQGTLVTVSS

SEQ ID NO: 3185 - protein, 119 aa, synthetic construct
EVQLVESGGGVVQPGGSLRLSCAASGRMHSINAMAWFRQVPGKEREFVALISWGNGITYYEDSMKGRFTISRDNAKNTMYLQMNSLRPEDTALYQCAAESYGSSWYDSWGQGTLVTVSS

SEQ ID NO: 3186 - protein, 119 aa, synthetic construct
EVQLVESGGGVVQPGGSLRLSCAASGRMHSINAMAWFRQVPGKEREFVALISWGNGITYYEDSMKGRFTISRDNAKNTMYLQMNSLRPEDTALYDCAAESYGSSWYDSWGQGTLVTVSS

SEQ ID NO: 3187 - protein, 119 aa, synthetic construct
EVQLVESGGGVVQPGGSLRLSCAASGRMHSINAMAWFRQVPGKEREFVALISWGNGITYYEDSMKGRFTISRDNAKNTMYLQMNSLRPEDTALYTCAAESYGSSWYDSWGQGTLVTVSS

SEQ ID NO: 3188 - protein, 119 aa, synthetic construct
EVQLVESGGGVVQPGGSLRLSCAASGRMHSINAMAWFRQVPGKEREFVALISWGNGITYYEDSMKGRFTISRDNAKNTMYLQMNSLRPEDTALYLCAAESYGSSWYDSWGQGTLVTVSS

SEQ ID NO: 3189 - protein, 119 aa, synthetic construct
EVQLVESGGGVVQPGGSLRLSCAASGRMHSINAMAWFRQVPGKEREFVALISWGNGITYYEDSMKGRFTISRDNAKNTMYLQMNSLRPEDTALYHCAAESYGSSWYDSWGQGTLVTVSS

SEQ ID NO: 3190 - protein, 119 aa, synthetic construct
EVQLVESGGGVVQPGGSLRLSCAASGRMHSINAMAWFRQVPGKEREFVALISWGNGITYYEDSMKGRFTISRDNAKNTMYLQMNSLRPEDTALYICAAESYGSSWYDSWGQGTLVTVSS

SEQ ID NO: 3191 - protein, 119 aa, synthetic construct
EVQLVESGGGVVQPGGSLRLSCAASGRMHSINAMAWFRQVPGKEREFVALISWGNGITYYEDSMKGRFTISRDNAKNTMYLQMNSLRPEDTALYPCAAESYGSSWYDSWGQGTLVTVSS

SEQ ID NO: 3192 - protein, 119 aa, synthetic construct
EVQLVESGGGVVQPGGSLRLSCAASGRMHSINAMAWFRQVPGKEREFVALISWGNGITYYEDSMKGRFTISRDNAKNTMYLQMNSLRPEDTALYVCAAESYGSSWYDSWGQGTLVTVSS

SEQ ID NO: 3193 - protein, 119 aa, synthetic construct
EVQLVESGGGVVQPGGSLRLSCAASGRMHSINAMAWFRQVPGKEREFVALISWGNGITYYEDSMKGRFTISRDNAKNTMYLQMNSLRPEDTALYKCAAESYGSSWYDSWGQGTLVTVSS

SEQ ID NO: 3194 - protein, 119 aa, synthetic construct
EVQLVESGGGVVQPGGSLRLSCAASGRMHSINAMAWFRQVPGKEREFVALISWGNGITYYEDSMKGRFTISRDNAKNTMYLQMNSLRPEDTALYRCAAESYGSSWYDSWGQGTLVTVSS

SEQ ID NO: 3195 - protein, 119 aa, synthetic construct
EVQLVESGGGVVQPGGSLRLSCAASGRMHSINAMAWFRQVPGKEREFVALISWGNGITYYEDSMKGRFTISRDNAKNTMYLQMNSLRPEDTALYGCAAESYGSSWYDSWGQGTLVTVSS

SEQ ID NO: 3196 - protein, 119 aa, synthetic construct
EVQLVESGGGVVQPGGSLRLSCAASGRMHSINAMAWFRQVPGKEREFVALISWGNGITYYEDSMKGRFTISRDNAKNTMYLQMNSLRPEDTALYYCSAESYGSSWYDSWGQGTLVTVSS

SEQ ID NO: 3197 - protein, 119 aa, synthetic construct
EVQLVESGGGVVQPGGSLRLSCAASGRMHSINAMAWFRQVPGKEREFVALISWGNGITYYEDSMKGRFTISRDNAKNTMYLQMNSLRPEDTALYSCAAESYGSSWYDSWGQGTLVTVSS

SEQ ID NO: 3198 - protein, 119 aa, synthetic construct
EVQLVESGGGVVQPGGSLRLSCAASGRMHSINAMAWFRQVPGKEREFVALISWGNGITYYEDSMKGRFTISRDNAKNTMYLQMNSLRPEDTALYFCPAESYGSSWYDSWGQGTLVTVSS

SEQ ID NO: 3199 - protein, 119 aa, synthetic construct
EVQLVESGGGVVQPGGSLRLSCAASGRMHSINAMAWFRQVPGKEREFVALISWGNGITYYEDSMKGRFTISRDNAKNTMYLQMNSLRPEDTALYFCRAESYGSSWYDSWGQGTLVTVSS

SEQ ID NO: 3200 - protein, 119 aa, synthetic construct
EVQLVESGGGVVQPGGSLRLSCAASGRMHSINAMAWFRQVPGKEREFVALISWGNGITYYEDSMKGRFTISRDNAKNTMYLQMNSLRPEDTALYFCIAESYGSSWYDSWGQGTLVTVSS

SEQ ID NO: 3201 - protein, 119 aa, synthetic construct
EVQLVESGGGVVQPGGSLRLSCAASGRMHSINAMAWFRQVPGKEREFVALISWGNGITYYEDSMKGRFTISRDNAKNTMYLQMNSLRPEDTALYFCFAESYGSSWYDSWGQGTLVTVSS

SEQ ID NO: 3202 - protein, 119 aa, synthetic construct
EVQLVESGGGVVQPGGSLRLSCAASGRMHSINAMAWFRQVPGKEREFVALISWGNGITYYEDSMKGRFTISRDNAKNTMYLQMNSLRPEDTALYFCEAESYGSSWYDSWGQGTLVTVSS

SEQ ID NO: 3203 - protein, 119 aa, synthetic construct
EVQLVESGGGVVQPGGSLRLSCAASGRMHSINAMAWFRQVPGKEREFVALISWGNGITYYEDSMKGRFTISRDNAKNTMYLQMNSLRPEDTALYFCQAESYGSSWYDSWGQGTLVTVSS

SEQ ID NO: 3204 - protein, 119 aa, synthetic construct
EVQLVESGGGVVQPGGSLRLSCAASGRMHSINAMAWFRQVPGKEREFVALISWGNGITYYEDSMKGRFTISRDNAKNTMYLQMNSLRPEDTALYFCYAESYGSSWYDSWGQGTLVTVSS

SEQ ID NO: 3205 - protein, 119 aa, synthetic construct
EVQLVESGGGVVQPGGSLRLSCAASGRMHSINAMAWFRQVPGKEREFVALISWGNGITYYEDSMKGRFTISRDDAKNTMYLQMNSLRPEDTALYFCSAESYGSSWYDSWGQGTLVTVSS

SEQ ID NO: 3206 - protein, 119 aa, synthetic construct
EVQLVESGGGVVQPGGSLRLSCAASGRMHSINAMAWFRQVPGKEREFVALISWGNGITYYEDSMKGRFTISRDNAKNTMYLQMNSLRPEDTALYFCSAESYGSSWYDSWGQGTLVTVSS

SEQ ID NO: 3207 - protein, 119 aa, synthetic construct
EVQLVESGGGVVQPGGSLRLSCAASGRMHSINAMAWFRQVPGKEREFVALISWGNGITYYEDSMKGRFTISRDNAKNTMYLQMNSLRPEDTALYFCDAESYGSSWYDSWGQGTLVTVSS

SEQ ID NO: 3208 - protein, 119 aa, synthetic construct
EVQLVESGGGVVQPGGSLRLSCAASGRMHSINAMAWFRQVPGKEREFVALISWGNGITYYEDSMKGRFTISRDNAKNTMYLQMNSLRPEDTALYFCGAESYGSSWYDSWGQGTLVTVSS

SEQ ID NO: 3209 - protein, 119 aa, synthetic construct
EVQLVESGGGVVQPGGSLRLSCAASGRMHSINAMAWFRQVPGKEREFVALISWGNGITYYEDSMKGRFTISRDNAKNTMYLQMNSLRPEDTALYFCLAESYGSSWYDSWGQGTLVTVSS

SEQ ID NO: 3210 - protein, 119 aa, synthetic construct
EVQLVESGGGVVQPGGSLRLSCAASGRMHSINAMAWFRQVPGKEREFVALISWGNGITYYEDSMKGRFTISRDNAKNTMYLQMNSLRPEDTALYFCVAESYGSSWYDSWGQGTLVTVSS

SEQ ID NO: 3211 - protein, 119 aa, synthetic construct
EVQLVESGGGVVQPGGSLRLSCAASGRMHSINAMAWFRQVPGKEREFVALISWGNGITYYEDSMKGRFTISRDNAKNTMYLQMNSLRPEDTALYFCTAESYGSSWYDSWGQGTLVTVSS

SEQ ID NO: 3212 - protein, 119 aa, synthetic construct
EVQLVESGGGVVQPGGSLRLSCAASGRMHSINAMAWFRQVPGKEREFVALISWGNGITYYEDSMKGRFTISRDNAKNTMYLQMNSLRPEDTALYFCHAESYGSSWYDSWGQGTLVTVSS

SEQ ID NO: 3213 - protein, 119 aa, synthetic construct
EVQLVESGGGVVQPGGSLRLSCAASGRMHSINAMAWFRQVPGKEREFVALISWGNGITYYEDSMKGRFTISRDNAKNTMYLQMNSLRPEDTALYFCARESYGSSWYDSWGQGTLVTVSS

SEQ ID NO: 3214 - protein, 119 aa, synthetic construct
EVQLVESGGGVVQPGGSLRLSCAASGRMHSINAMAWFRQVPGKEREFVALISWGNGITYYEDSMKGRFTISRDNAKNTMYLQMNSLRPEDTALYFCAKESYGSSWYDSWGQGTLVTVSS

SEQ ID NO: 3215 - protein, 119 aa, synthetic construct
EVQLVESGGGVVQPGGSLRLSCAASGRMHSINAMAWFRQVPGKEREFVALISWGNGITYYEDSMKGRFTISRDNAKNTMYLQMNSLRPEDTALYFCAVESYGSSWYDSWGQGTLVTVSS

SEQ ID NO: 3216 - protein, 119 aa, synthetic construct
EVQLVESGGGVVQPGGSLRLSCAASGRMHSINAMAWFRQVPGKEREFVALISWGNGITYYEDSMKGRFTISRDNAKNTMYLQMNSLRPEDTALYFCAIESYGSSWYDSWGQGTLVTVSS

SEQ ID NO: 3217 - protein, 119 aa, synthetic construct
EVQLVESGGGVVQPGGSLRLSCAASGRMHSINAMAWFRQVPGKEREFVALISWGNGITYYEDSMKGRFTISRDNAKNTMYLQMNSLRPEDTALYFCAEESYGSSWYDSWGQGTLVTVSS

SEQ ID NO: 3218 - protein, 119 aa, synthetic construct
EVQLVESGGGVVQPGGSLRLSCAASGRMHSINAMAWFRQVPGKEREFVALISWGNGITYYEDSMKGRFTISRDNAKNTMYLQMNSLRPEDTALYFCAPESYGSSWYDSWGQGTLVTVSS

SEQ ID NO: 3219 - protein, 119 aa, synthetic construct
EVQLVESGGGVVQPGGSLRLSCAASGRMHSINAMAWFRQVPGKEREFVALISWGNGITYYEDSMKGRFTISRDNAKNTMYLQMNSLRPEDTALYFCALESYGSSWYDSWGQGTLVTVSS

SEQ ID NO: 3220 - protein, 119 aa, synthetic construct
EVQLVESGGGVVQPGGSLRLSCAASGRMHSINAMAWFRQVPGKEREFVALISWGNGITYYEDSMKGRFTISRDNAKNTMYLQMNSLRPEDTALYFCAGESYGSSWYDSWGQGTLVTVSS

SEQ ID NO: 3221 - protein, 119 aa, synthetic construct
EVQLVESGGGVVQPGGSLRLSCAASGRMHSINAMAWFRQVPGKEREFVALISWGNGITYYEDSMKGRFTISRDNAKNTMYLQMNSLRPEDTALYFCATESYGSSWYDSWGQGTLVTVSS

SEQ ID NO: 3222 - protein, 119 aa, synthetic construct
EVQLVESGGGVVQPGGSLRLSCAASGRMHSINAMAWFRQVPGKEREFVALISWGNGITYYEDSMKGRFTISRDNAKNTMYLQMNSLRPEDTALYFCAHESYGSSWYDSWGQGTLVTVSS

SEQ ID NO: 3223 - protein, 119 aa, synthetic construct
EVQLVESGGGVVQPGGSLRLSCAASGRMHSINAMAWFRQVPGKEREFVALISWGNGITYYEDSMKGRFTISRDNAKNTMYLQMNSLRPEDTALYFCADESYGSSWYDSWGQGTLVTVSS

SEQ ID NO: 3224 - protein, 119 aa, synthetic construct
EVQLVESGGGVVQPGGSLRLSCAASGRMHSINAMAWFRQVPGKEREFVALISWGNGITYYEDSMKGRFTISRDNAKNTMYLQMNSLRPEDTALYFCAYESYGSSWYDSWGQGTLVTVSS

SEQ ID NO: 3225 - protein, 119 aa, synthetic construct
EVQLVESGGGVVQPGGSLRLSCAASGRMHSINAMAWFRQVPGKEREFVALISWGNGITYYEDSMKGRFTISRDNAKNTMYLQMNSLRPEDTALYFCASESYGSSWYDSWGQGTLVTVSS

SEQ ID NO: 3226 - protein, 119 aa, synthetic construct
EVQLVESGGGVVQPGGSLRLSCAASGRMHSINAMAWFRQVPGKEREFVALISWGNGITYYEDSMKGRFTISRDNAKNTMYLQMNSLRPEDTALYFCAFESYGSSWYDSWGQGTLVTVSS

SEQ ID NO: 3227 - protein, 119 aa, synthetic construct
EVQLVESGGGVVQPGGSLRLSCAASGRMHSINAMAWFRQVPGKEREFVALISWGNGITYYEDSMKGRFTISRDNAKNTMYLQMNSLRPEDTALYFCAAPSYGSSWYDSWGQGTLVTVSS

SEQ ID NO: 3228 - protein, 119 aa, synthetic construct
EVQLVESGGGVVQPGGSLRLSCAASGRMHSINAMAWFRQVPGKEREFVALISWGNGITYYEDSMKGRFTISRDNAKNTMYLQMNSLRPEDTALYFCAADSYGSSWYDSWGQGTLVTVSS

SEQ ID NO: 3229 - protein, 119 aa, synthetic construct
EVQLVESGGGVVQPGGSLRLSCAASGRMHSINAMAWFRQVPGKEREFVALISWGNGITYYEDSMKGRFTISRDNAKNTMYLQMNSLRPEDTALYFCAAASYGSSWYDSWGQGTLVTVSS

SEQ ID NO: 3230 - protein, 119 aa, synthetic construct
EVQLVESGGGVVQPGGSLRLSCAASGRMHSINAMAWFRQVPGKEREFVALISWGNGITYYEDSMKGRFTISRDNAKNTMYLQMNSLRPEDTALYFCAAKSYGSSWYDSWGQGTLVTVSS

SEQ ID NO: 3231 - protein, 119 aa, synthetic construct
EVQLVESGGGVVQPGGSLRLSCAASGRMHSINAMAWFRQVPGKEREFVALISWGNGITYYEDSMKGRFTISRDNAKNTMYLQMNSLRPEDTALYFCAAISYGSSWYDSWGQGTLVTVSS

SEQ ID NO: 3232 - protein, 119 aa, synthetic construct
EVQLVESGGGVVQPGGSLRLSCAASGRMHSINAMAWFRQVPGKEREFVALISWGNGITYYEDSMKGRFTISRDNAKNTMYLQMNSLRPEDTALYFCAAYSYGSSWYDSWGQGTLVTVSS

SEQ ID NO: 3233 - protein, 119 aa, synthetic construct
EVQLVESGGGVVQPGGSLRLSCAASGRMHSINAMAWFRQVPGKEREFVALISWGNGITYYEDSMKGRFTISRDNAKNTMYLQMNSLRPEDTALYFCAAHSYGSSWYDSWGQGTLVTVSS

SEQ ID NO: 3234 - protein, 119 aa, synthetic construct
EVQLVESGGGVVQPGGSLRLSCAASGRMHSINAMAWFRQVPGKEREFVALISWGNGITYYEDSMKGRFTISRDNAKNTMYLQMNSLRPEDTALYFCAARSYGSSWYDSWGQGTLVTVSS

SEQ ID NO: 3235 - protein, 119 aa, synthetic construct
EVQLVESGGGVVQPGGSLRLSCAASGRMHSINAMAWFRQVPGKEREFVALISWGNGITYYEDSMKGRFTISRDNAKNTMYLQMNSLRPEDTALYFCAAFSYGSSWYDSWGQGTLVTVSS

SEQ ID NO: 3236 - protein, 119 aa, synthetic construct
EVQLVESGGGVVQPGGSLRLSCAASGRMHSINAMAWFRQVPGKEREFVALISWGNGITYYEDSMKGRFTISRDNAKNTMYLQMNSLRPEDTALYFCAASSYGSSWYDSWGQGTLVTVSS

SEQ ID NO: 3237 - protein, 119 aa, synthetic construct
EVQLVESGGGVVQPGGSLRLSCAASGRMHSINAMAWFRQVPGKEREFVALISWGNGITYYEDSMKGRFTISRDNAKNTMYLQMNSLRPEDTALYFCAATSYGSSWYDSWGQGTLVTVSS

SEQ ID NO: 3238 - protein, 119 aa, synthetic construct
EVQLVESGGGVVQPGGSLRLSCAASGRMHSINAMAWFRQVPGKEREFVALISWGNGITYYEDSMKGRFTISRDNAKNTMYLQMNSLRPEDTALYFCAAVSYGSSWYDSWGQGTLVTVSS

SEQ ID NO: 3239 - protein, 119 aa, synthetic construct
EVQLVESGGGVVQPGGSLRLSCAASGRMHSINAMAWFRQVPGKEREFVALISWGNGITYYEDSMKGRFTISRDNAKNTMYLQMNSLRPEDTALYFCAAGSYGSSWYDSWGQGTLVTVSS

SEQ ID NO: 3240 - protein, 119 aa, synthetic construct
EVQLVESGGGVVQPGGSLRLSCAASGRMHSINAMAWFRRVPGKEREFVALISWGNGITYYEDSMKGRFTISRDNAKNTMYLQMNSLRPEDTALYFCAAKSYGSSWYDSWGQGTLVTVSS

SEQ ID NO: 3241 - protein, 119 aa, synthetic construct
EVQLVESGGGVVQPGGSLRLSCAASGRMHSINAMAWFRQVPGKEREFVALISWGNGITYYEDSMKGRFTISRDNAKNTMYLQMNSLRPEDTALYFCAAQSYGSSWYDSWGQGTLVTVSS

SEQ ID NO: 3242 - protein, 119 aa, synthetic construct
EVQLVESGGGVVQPGGSLRLSCAASGRMHSINAMAWFRQVPGKEREFVALISWGNGITYYEDSMKGRFTISRDNAKNTMYLQMNSLRPEDTALYFCAAEFYGSSWYDSWGQGTLVTVSS

SEQ ID NO: 3243 - protein, 119 aa, synthetic construct
EVQLVESGGGVVQPGGSLRLSCAASGRMHSINAMAWFRQVPGKEREFVALISWGNGITYYEDSMKGRFTISRDNAKNTMYLQMNSLRPEDTALYFCAAEAYGSSWYDSWGQGTLVTVSS

SEQ ID NO: 3244 - protein, 119 aa, synthetic construct
EVQLVESGGGVVQPGGSLRLSCAASGRMHSINAMAWFRQVPGKEREFVALISWGNGITYYEDSMKGRFTISRDNAKNTMYLQMNSLRPEDTALYFCAAEYYGSSWYDSWGQGTLVTVSS

SEQ ID NO: 3245 - protein, 119 aa, synthetic construct
EVQLVESGGGVVQPGGSLRLSCAASGRMHSINAMAWFRQVPGKEREFVALISWGNGITYYEDSMKGRFTISRDNAKNTMYLQMNSLRPEDTALYFCAAEEYGSSWYDSWGQGTLVTVSS

SEQ ID NO: 3246 - protein, 119 aa, synthetic construct
EVQLVESGGGVVQPGGSLRLSCAASGRMHSINAMAWFRQVPGKEREFVALISWGNGITYYEDSMKGRFTISRDNAKNTMYLQMNSLRPEDTALYFCAAEIYGSSWYDSWGQGTLVTVSS

SEQ ID NO: 3247 - protein, 119 aa, synthetic construct
EVQLVESGGGVVQPGGSLRLSCAASGRMHSINAMAWFRQVPGKEREFVALISWGNGITYYEDSMKGRFTISRDNAKNTMYLQMNSLRPEDTALYFCAAEDYGSSWYDSWGQGTLVTVSS

SEQ ID NO: 3248 - protein, 119 aa, synthetic construct
EVQLVESGGGVVQPGGSLRLSCAASGRMHSINAMAWFRQVPGKEREFVALISWGNGITYYEDSMKGRFTISRDNAKNTMYLQMNSLRPEDTALYFCAAEKYGSSWYDSWGQGTLVTVSS

SEQ ID NO: 3249 - protein, 119 aa, synthetic construct
EVQLVESGGGVVQPGGSLRLSCAASGRMHSINAMAWFRQVPGKEREFVALISWGNGITYYEDSMKGRFTISRDNAKNTMYLQMNSLRPEDTALYFCAAEGYGSSWYDSWGQGTLVTVSS

SEQ ID NO: 3250 - protein, 119 aa, synthetic construct
EVQLVESGGGVVQPGGSLRLSCAASGRMHSINAMAWFRQVPGKEREFVALISWGNGITYYEDSMKGRFTISRDNAKNTMYLQMNSLRPEDTALYFCAAERYGSSWYDSWGQGTLVTVSS

SEQ ID NO: 3251 - protein, 119 aa, synthetic construct
EVQLVESGGGVVQPGGSLRLSCAASGRMHSINAMAWFRQVPGKEREFVALISWGNGITYYEDSMKGRFTISRDNAKNTMYLQMNSLRPEDTALYFCAAEPYGSSWYDSWGQGTLVTVSS

SEQ ID NO: 3252 - protein, 119 aa, synthetic construct
EVQLVESGGGVVQPGGSLRLSCAASGRMHSINAMAWFRQVPGKEREFVALIRWGNGITYYEDSMKGRFTISRDNAKNTMYLQMNSLRPEDTALYFCAAEYYGSSWYDSWGQGTLVTVSS

SEQ ID NO: 3253 - protein, 119 aa, synthetic construct
EVQLVESGGGVVQPGGSLRLSCAASGRMHSINAMAWFRQVPGKEREFVALISWGNGITYYEDSMKGRFTISRDNAKNTMYLQMNSLRPEDTALYFCAAEQYGSSWYDSWGQGTLVTVSS

SEQ ID NO: 3254 - protein, 119 aa, synthetic construct
EVQLVESGGGVVQPGGSLRLSCAASGRMHSINAMAWFRQVPGKEREFVALISWGNGITYYEDSMKGRFTISRDNAKNTMYLQMNSLRPEDTALYFCAAETYGSSWYDSWGQGTLVTVSS

SEQ ID NO: 3255 - protein, 119 aa, synthetic construct
EVQLVESGGGVVQPGGSLRLSCAASGRMHSINAMAWFRQVPGKEREFVALISWGNGITYYEDSMKGRFTISRDNAKNTMYLQMNSLRPEDTALYFCAAEHYGSSWYDSWGQGTLVTVSS

SEQ ID NO: 3256 - protein, 119 aa, synthetic construct
EVQLVESGGGVVQPGGSLRLSCAASGRMHSINAMAWFRQVPGKEREFVALISWGNGITYYEDSMKGRFTISRDNAKNTMYLQMNSLRPEDTALYFCAAELYGSSWYDSWGQGTLVTVSS

SEQ ID NO: 3257 - protein, 119 aa, synthetic construct
EVQLVESGGGVVQPGGSLRLSCAASGRMHSINAMAWFRQVPGKEREFVALISWGNGITYYEDSMKGRFTISRDNAKNTMYLQMNSLRPEDTALYFCAAESDGSSWYDSWGQGTLVTVSS

SEQ ID NO: 3258 - protein, 119 aa, synthetic construct
EVQLVESGGGVVQPGGSLRLSCAASGRMHSINAMAWFRQVPGKEREFVALISWGNGITYYEDSMKGRFTISRDNAKNTMYLQMNSLRPEDTALYFCAAESFGSSWYDSWGQGTLVTVSS

SEQ ID NO: 3259 - protein, 119 aa, synthetic construct
EVQLVESGGGVVQPGGSLRLSCAASGRMHSINAMAWFRQVPGKEREFVALISWGNGITYYEDSMKGRFTISRDNAKNTMYLQMNSLRPEDTALYFCAAESEGSSWYDSWGQGTLVTVSS

SEQ ID NO: 3260 - protein, 119 aa, synthetic construct
EVQLVESGGGVVQPGGSLRLSCAASGRMHSINAMAWFRQVPGKEREFVALISWGNGITYYEDSMKGRFTISRDNAKNTMYLQMNSLRPEDTALYFCAAESRGSSWYDSWGQGTLVTVSS

SEQ ID NO: 3261 - protein, 119 aa, synthetic construct
EVQLVESGGGVVQPGGSLRLSCAASGRMHSINAMAWFRRVPGKEREFVALISWGNGITYYEDSMKGRFTISRDNAKNTMYLQMNSLRPEDTALYFCAAESKGSSWYDSWGQGTLVTVSS

SEQ ID NO: 3262 - protein, 119 aa, synthetic construct
EVQLVESGGGVVQPGGSLRLSCAASGRMHSINAMAWFRQVPGKEREFVALISWGNGITYYEDSMKGRFTISRDNAKNTMYLQMNSLRPEDTALYFCAAESIGSSWYDSWGQGTLVTVSS

SEQ ID NO: 3263 - protein, 119 aa, synthetic construct
EVQLVESGGGVVQPGGSLRLSCAASGRMHSINAMAWFRQVPGKEREFVALISWGNGITYYEDSMKGRFTISRDNAKNTMYLQMNSLRPEDTALYFCAAESTGSSWYDSWGQGTLVTVSS

SEQ ID NO: 3264 - protein, 119 aa, synthetic construct
EVQLVESGGGVVQPGGSLRLSCAASGRMHSINAMAWFRQVPGKEREFVALISWGNGITYYEDSMKGRFTISRDNAKNTMYLQMNSLRPEDTALYFCAAESAGSSWYDSWGQGTLVTVSS

SEQ ID NO: 3265 - protein, 119 aa, synthetic construct
EVQLVESGGGVVQPGGSLRLSCAASGRMHSINAMAWFRQVPGKEREFVALISWGNGITYYEDSMKGRFTISRDNAKNTMYLQMNSLRPEDTALYFCAAESQGSSWYDSWGQGTLVTVSS

SEQ ID NO: 3266 - protein, 119 aa, synthetic construct
EVQLVESGGGVVQPGGSLRLSCAASGRMHSINAMAWFRQVPGKEREFVALISWGNGITYYEDSMKGRFTISRDNAKNTMYLQMNSLRPEDTALYFCAAESSGSSWYDSWGQGTLVTVSS

SEQ ID NO: 3267 - protein, 119 aa, synthetic construct
EVQLVESGGGVVQPGGSLRLSCAASGRMHSINAMAWFRQVPGKEREFVALISWGNGITYYEDSMKGRFTISRDNAKNTMYLQMNSLRPEDTALYFCAAESVGSSWYDSWGQGTLVTVSS

SEQ ID NO: 3268 - protein, 119 aa, synthetic construct
EVQLVESGGGVVQPGGSLRLSCAASGRMHSINAMAWFRQVPGKEREFVALISWGNGITYYEDSMKGRFTISRDNAKNTMYLQMNSLRPEDTALYFCAAESHGSSWYDSWGQGTLVTVSS

SEQ ID NO: 3269 - protein, 119 aa, synthetic construct
EVQLVESGGGVVQPGGSLRLSCAASGRMHSINAMAWFRQVPGKEREFVALISWGNGITYYEDSMKGRFTISRDNAKNTMYLQMNSLRPEDTALYFCAAESGGSSWYDSWGQGTLVTVSS

SEQ ID NO: 3270 - protein, 119 aa, synthetic construct
EVQLVESGGGVVQPGGSLRLSCAASGRMHSINAMAWFRQVPGKEREFVALISWGNGITYYEDSMKGRFTISRDNAKNTMYLQMNSLRPEDTALYFCAAESKGSSWYDSWGQGTLVTVSS

SEQ ID NO: 3271 - protein, 119 aa, synthetic construct
EVQLVESGGGVVQPGGSLRLSCAASGRMHSINAMAWFRQVPGKEREFVALISWGNGITYYEDSMKGRFTISRDNAKNTMYLQMNSLRPEDTALYFCAAESPGSSWYDSWGQGTLVTVSS

SEQ ID NO: 3272 - protein, 119 aa, synthetic construct
EVQLVESGGGVVQPGGSLRLSCAASGRMHSINAMAWFRQVPGKEREFVALISWGNGITYYEDSMKGRFTISRDNAKNTMYLQMNSLRPEDTALYFCAAESYLSSWYDSWGQGTLVTVSS

SEQ ID NO: 3273 - protein, 119 aa, synthetic construct
EVQLVESGGGVVQPGGSLRLSCAASGRMHSINAMAWFRQVPGKEREFVALISWGNGITYYEDSMKGRFTISRDNAKNTMYLQMNSLRPEDTALYFCAAESYISSWYDSWGQGTLVTVSS

SEQ ID NO: 3274 - protein, 119 aa, synthetic construct
EVQLVESGGGVVQPGGSLRLSCAASGRMHSINAMAWFRQVPGKEREFVALISWGNGITYYEDSMKGRFTISRDNAKNTMYLQMNSLRPEDTALYFCAAESYHSSWYDSWGQGTLVTVSS

SEQ ID NO: 3275 - protein, 119 aa, synthetic construct
EVQLVESGGGVVQPGGSLRLSCAASGRMHSINAMAWFRQVPGKEREFVALISWGNGITYYEDSMKGRFTISRDNAKNTMYLQMNSLRPEDTALYFCAAESYSSSWYDSWGQGTLVTVSS

SEQ ID NO: 3276 - protein, 119 aa, synthetic construct
EVQLVESGGGVVQPGGSLRLSCAASGRMHSINAMAWFRQVPGKEREFVALISWGNGITYYEDSMKGRFTISRDNAKNTMYLQMNSLRPEDTALYFCAAESYVSSWYDSWGQGTLVTVSS

SEQ ID NO: 3277 - protein, 119 aa, synthetic construct
EVQLVESGGGVVQPGGSLRLSCAASGRMHSINAMAWFRQVPGKEREFVALISWGNGITYYEDSMKGRFTISRDNAKNTMYLQMNSLRPEDTALYFCAAESYRSSWYDSWGQGTLVTVSS

SEQ ID NO: 3278 - protein, 119 aa, synthetic construct
EVQLVESGGGVVQPGGSLRLSCAASGRMHSINAMAWFRQVPGKEREFVALISWGNGITYYEDSMKGRFTISRDNAKNTMYLQMNSLRPEDTALYFCAAESYPSSWYDSWGQGTLVTVSS

SEQ ID NO: 3279 - protein, 119 aa, synthetic construct
EVQLVESGGGVVQPGGSLRLSCAASGRMHSINAMAWFRQVPGKEREFVALISWGNGITYYEDSMKGRFTISRDNAKNTMYLQMNSLRPEDTALYFCAAESYESSWYDSWGQGTLVTVSS

SEQ ID NO: 3280 - protein, 119 aa, synthetic construct
EVQLVESGGGVVQPGGSLRLSCAASGRMHSINAMAWFRQVPGKEREFVALISWGNGITYYEDSMKGRFTISRDNAKNTMYLQMNSLRPEDTALYFCAAESYASSCYDSWGQGTLVTVSS

SEQ ID NO: 3281 - protein, 119 aa, synthetic construct
EVQLVESGGGVVQPGGSLRLSCAASGRMHSINAMAWFRQVPGKEREFVALISWGNGITYYEDSMKGRFTISRDNAKNTMYLQMNSLRPEDTALYFCAAESYKSSWYDSWGQGTLVTVSS

SEQ ID NO: 3282 - protein, 119 aa, synthetic construct
EVQLVESGGGVVQPGGSLRLSCAASGRMHSINAMAWFRQVPGKEREFVALISWGNGITYYEDSMKGRFTISRDNAKNTMYLQMNSLRPEDTALYFCAAESYYSSWYDSWGQGTLVTVSS

SEQ ID NO: 3283 - protein, 119 aa, synthetic construct
EVQLVESGGGVVQPGGSLRLSCAASGRMHSINAMAWFRQVPGKEREFVALISWGNGITYYEDSMKGRFTISRDNAKNTMYLQMNSLRPEDTALYFCAAESYTSSWYDSWGQGTLVTVSS

SEQ ID NO: 3284 - protein, 119 aa, synthetic construct
EVQLVESGGGVVQPGGSLRLSCAASGRMHSINAMAWFRQVPGKEREFVALISWGNGITYYEDSMKGRFTISRDNAKNTMYLQMNSLRPEDTALYFCAAESYFSSWYDSWGQGTLVTVSS

SEQ ID NO: 3285 - protein, 119 aa, synthetic construct
EVQLVESGGGVVQPGGSLRLSCAASGRMHSINAMAWFRQVPGKEREFVALISWGNGITYYEDSMKGRFTISRDNAKNTMYLQMNSLRPEDTALYFCAAESYASSWYDSWGQGTLVTVSS

SEQ ID NO: 3286 - protein, 119 aa, synthetic construct
EVQLVESGGGVVQPGGSLRLSCAASGRMHSINAMAWFRQVPGKEREFVALISWGNGITYYEDSMKGRFTISRDNAKNTMYLQMNSLRPEDTALYFCAAESYDSSWYDSWGQGTLVTVSS

SEQ ID NO: 3287 - protein, 119 aa, synthetic construct
EVQLVESGGGVVQPGGSLRLSCAASGRMHSINAMAWFRQVPGKEREFVALISWGNGITYYEDSMKGRFTISRDNAKNTMYLQMNSLRPEDTALYFCAAESYGSSPYDSWGQGTLVTVSS

SEQ ID NO: 3288 - protein, 119 aa, synthetic construct
EVQLVESGGGVVQPGGSLRLSCAASGRMHSINAMAWFRQVPGKEREFVALISWGNGITYYEDSMKGRFTISRDNAKNTMYLQMNSLRPEDTALYFCAAESYGSSKYDSWGQGTLVTVSS

SEQ ID NO: 3289 - protein, 119 aa, synthetic construct
EVQLVESGGGVVQPGGSLRLSCAASGRMHSINAMAWFRQVPGKEREFVALISWGNGITYYEDSMKGRFTISRDNAKNTMYLQMNSLRPEDTALYFCAAESYGSSYYDSWGQGTLVTVSS

SEQ ID NO: 3290 - protein, 119 aa, synthetic construct
EVQLVESGGGVVQPGGSLRLSCAASGRMHSINAMAWFRQVPGKEREFVALISWGNGITYYEDSMKGRFTISRDNAKNTMYLQMNSLRPEDTALYFCAAESYGSSVYDSWGQGTLVTVSS

SEQ ID NO: 3291 - protein, 119 aa, synthetic construct
EVQLVESGGGVVQPGGSLRLSCAASGRMHSINAMAWFRQVPGKEREFVALISWGNGITYYEDSMKGRFTISRDNAKNTMYLQMNSLRPEDTALYFCAAESYGSSFYDSWGQGTLVTVSS

SEQ ID NO: 3292 - protein, 119 aa, synthetic construct
EVQLVESGGGVVQPGGSLRLSCAASGRMHSINAMAWFRQVPGKEREFVALISWGNGITYYEDSMKGRFTISRDNAKNTMYLQMNSLRPEDTALYFCAAESYGSSAYDSWGQGTLVTVSS

SEQ ID NO: 3293 - protein, 119 aa, synthetic construct
EVQLVESGGGVVQPGGSLRLSCAASGRMHSINAMAWFRQVPGKEREFVALISWGNGITYYEDSMKGRFTISRDNAKNTMYLQMNSLRPEDTALYFCAAESYGSSIYDSWGQGTLVTVSS

SEQ ID NO: 3294 - protein, 119 aa, synthetic construct
EVQLVESGGGVVQPGGSLRLSCAASGRMHSINAMAWFRQVPGKEREFVALISWGNGITYYEDSMKGRFTISRDNAKNTMYLQMNSLRPEDTALYFCAAESYGSSTYDSWGQGTLVTVSS

SEQ ID NO: 3295 - protein, 119 aa, synthetic construct
EVQLVESGGGVVQPGGSLRLSCAASGRMHSINAMAWFRQVPGKEREFVALISWGNGITYYEDSMKGRFTISRDNAKNTMYLQMNSLRPEDTALYFCAAESYGSSLYDSWGQGTLVTVSS

SEQ ID NO: 3296 - protein, 119 aa, synthetic construct
EVQLVESGGGVVQPGGSLRLSCAASGRMHSINAMAWFRQVPGKEREFVALISWGNGITYYEDSMKGRFTISRDNAKNTMYLQMNSLRPEDTALYFCAAESYGSSHYDSWGQGTLVTVSS

SEQ ID NO: 3297 - protein, 119 aa, synthetic construct
EVQLVESGGGVVQPGGSLRLSCAASGRMHSINAMAWFRQVPGKEREFVALISWGNGITYYEDSMKGRFTISRDNAKNTMYLQMNSLRPEDTALYFCAAESYGSSGYDSWGQGTLVTVSS

SEQ ID NO: 3298 - protein, 119 aa, synthetic construct
EVQLVESGGGVVQPGGSLRLSCAASGRMHSINAMAWFRQVPGKEREFVALISWGNGITYYEDSMKGRFTISRDNAKNTMYLQMNSLRPEDTALYFCAAESYGSSQYDSWGQGTLVTVSS

SEQ ID NO: 3299 - protein, 119 aa, synthetic construct
EVQLVESGGGVVQPGGSLRLSCAASGRMHSINAMAWFRQVPGKEREFVALISWGNGITYYEDSMKGRFTISRDNAKNTMYLQMNSLRPEDTALYFCAAESYGSSRYDSWGQGTLVTVSS

SEQ ID NO: 3300 - protein, 119 aa, synthetic construct
EVQLVESGGGVVQPGGSLRLSCAASGRMHSINAMAWFRQVPGKEREFVALISWGNGITYYEDSMKGRFTISRDNAKNTMYLQMNSLRPEDTALYFCAAESYGSSDYDSWGQGTLVTVSS

SEQ ID NO: 3301 - protein, 119 aa, synthetic construct
EVQLVESGGGVVQPGGSLRLSCAASGRMHSINAMAWFRQVPGKEREFVALISWGNGITYYEDSMKGRFTISRDNAKNTMYLQMNSLRPEDTALYFCAAESYGSSEYDSWGQGTLVTVSS

SEQ ID NO: 3302 - protein, 119 aa, synthetic construct
EVQLVESGGGVVQPGGSLRLSCAASGRMHSINAMAWFRQVPGKEREFVALISWGNGITYYEDSMKGRFTISRDNAKNTMYLQMNSLRPEDTALYFCAAESYGSSYYDSWGRGTLVTVSS

SEQ ID NO: 3303 - protein, 119 aa, synthetic construct
EVQLVESGGGVVQPGGSLRLSCAASGRMHSINAMAWFRQVPGKEREFVALISWGNGITYYEDSMKGRFTISRDNAKNTMYLQMNSLRPEDTALYFCAAESYGSSWFDSWGQGTLVTVSS

SEQ ID NO: 3304 - protein, 119 aa, synthetic construct
EVQLVESGGGVVQPGGSLRLSCAASGRMHSINAMAWFRQVPGKEREFVALISWGNGITYYEDSMKGRFTISRDNAKNTMYLQMNSLRPEDTALYFCAAESYGSSWQDSWGQGTLVTVSS

SEQ ID NO: 3305 - protein, 119 aa, synthetic construct
EVQLVESGGGVVQPGGSLRLSCAASGRMHSINAMAWFRQVPGKEREFVALISWGNSITYYEDSMKGRFTISRDNAKNTMYLQMNSLRPEDTALYFCAAESYGSSWPDSWGQGTLVTVSS

SEQ ID NO: 3306 - protein, 119 aa, synthetic construct
EVQLVESGGGVVQPGGSLRLSCAASGRMHSINAMAWFRQVPGKEREFVALISWGNGITYYEDSMKGRFTISRDNAKNTMYLQMNSLRPEDTALYFCAAESYGSSWKDSWGQGTLVTVSS

SEQ ID NO: 3307 - protein, 119 aa, synthetic construct
EVQLVESGGGVVQPGGSLRLSCAASGRMHSINAMAWFRQVPGKEREFVALISWGNGITYYEDSMKGRFTISRDNAKNTMYLQMNSLRPEDTALYFCAAESYGSSWTDSWGQGTLVTVSS

SEQ ID NO: 3308 - protein, 119 aa, synthetic construct
EVQLVESGGGVVQPGGSLRLSCAASGRMHSINAMAWFRQVPGKEREFVALISWGNGITYYEDSMKGRFTISRDNAKNTMYLQMNSLRPEDTALYFCAAESYGSSWRDSWGQGTLVTVSS

SEQ ID NO: 3309 - protein, 119 aa, synthetic construct
EVQLVESGGGVVQPGGSLRLSCAASGRMHSINAMAWFRQVPGKEREFVALISWGNGITYYEDSMKGRFTISRDNAKNTMYLQMNSLRPEDTALYFCAAESYGSSWDDSWGQGTLVTVSS

SEQ ID NO: 3310 - protein, 119 aa, synthetic construct
EVQLVESGGGVVQPGGSLRLSCAASGRMHSINAMAWFRQVPGKEREFVALISWGNGITYYEDSMKGRFTISRDNAKNTMYLQMNSLRPEDTALYFCAAESYGSSWIDSWGQGTLVTVSS

SEQ ID NO: 3311 - protein, 119 aa, synthetic construct
EVQLVESGGGVVQPGGSLRLSCAASGRMHSINAMAWFRQVPGKEREFVALISWGNGITYYEDSMKGRFTISRDNAKNTMYLQMNSLRPEDTALYFCAAESYGSSWEDSWGQGTLVTVSS

SEQ ID NO: 3312 - protein, 119 aa, synthetic construct
EVQLVESGGGVVQPGGSLRLSCAASGRMHSINAMAWFRQVPGKEREFVALISWGNGITYYEDSMKGRFTISRDNAKNTMYLQMNSLRPEDTALYFCAAESYGSSWLDSWGQGTLVTVSS

SEQ ID NO: 3313 - protein, 119 aa, synthetic construct
EVQLVESGGGVVQPGGSLRLSCAASGRMHSINAMAWFRQVPGKEREFVALISWGNGITYYEDSMKGRFTISRDNAKNTMYLQMNSLRPEDTALYFCAAESYGSSWPDSWGQGTLVTVSS

SEQ ID NO: 3314 - protein, 119 aa, synthetic construct
EVQLVESGGGVVQPGGSLRLSCAASGRMHSINAMAWFRQVPGKEREFVALISWGNGITYYEDSMKGRFTISRDNAKNTMYLQMNSLRPEDTALYFCAAESYGSSWHDSWGQGTLVTVSS

SEQ ID NO: 3315 - protein, 119 aa, synthetic construct
EVQLVESGGGVVQPGGSLRLSCAASGRMHSINAMAWFRQVPGKEREFVALISWGNGITYYEDSMKGRFTISRDNAKNTMYLQMNSLRPEDTALYFCAAESYGSSWVDSWGQGTLVTVSS

SEQ ID NO: 3316 - protein, 119 aa, synthetic construct
EVQLVESGGGVVQPGGSLRLSCAASGRMHSINAMAWFRQVPGKEREFVALISWGNGITYYEDSMKGRFTISRDNAKNTMYLQMNSLRPEDTALYFCAAESYGSSWADSWGQGTLVTVSS

SEQ ID NO: 3317 - protein, 119 aa, synthetic construct
EVQLVESGGGVVQPGGSLRLSCAASGRMHSINAMAWFRQVPGKEREFVALISWGNGITYYEDSMKGRFTISRDNAKNTMYLQMNSLRPEDTALYFCAAESYGSSWGDSWGQGTLVTVSS

SEQ ID NO: 3318 - protein, 119 aa, synthetic construct
EVQLVESGGGVVQPGGSLRLSCAASGRMHSINAMAWFRQVPGKEREFVALISWGNGITYYEDSMKGRFTISRDNAKNTMYLQMNSLRPEDTALYFCAAESYGSSWSDSWGQGTLVTVSS

SEQ ID NO: 3319 - protein, 119 aa, synthetic construct
EVQLVESGGGVVQPGGSLRLSCAASGRMHSINAMAWFRQVPGKEREFVALISWGNGITYYEDSMKGRFTISRDNAKNTMYLQMNSLRPEDTALYFCAAESYGSSWYASWGQGTLVTVSS

SEQ ID NO: 3320 - protein, 119 aa, synthetic construct
EVQLVESGGGVVQPGGSLRLSCAASGRMHSINAMAWFRQVPGKEREFVALISWGNGITYYEDSMKGRFTISRDNAKNTMYLQMNSLRPEDTALYFCAAESYGSSWYSSWGQGTLVTVSS

SEQ ID NO: 3321 - protein, 119 aa, synthetic construct
EVQLVESGGGVVQPGGSLRLSCAASGRMHSINAMAWFRQVPGKEREFVALISWGNGITYYEDSMKGRFTISRDNAKNTMYLQMNSLRPEDTALYFCAAESYGSSWYLSWGQGTLVTVSS

SEQ ID NO: 3322 - protein, 119 aa, synthetic construct
EVQLVESGGGVVQPGGSLRLSCAASGRMHSINAMAWFRQVPGKEREFVALISWGNGITYYEDSMKGRFTISRDNAKNTMYLQMNSLRPEDTALYFCAAESYGSSWYKSWGQGTLVTVSS

SEQ ID NO: 3323 - protein, 119 aa, synthetic construct
EVQLVESGGGVVQPGGSLRLSCAASGRMHSINAMAWFRQVPGKEREFVALISWGNGITYYEDSMKGRFTISRDNAKNTMYLQMNSLRPEDTALYFCAAESYGSSWYTSWGQGTLVTVSS

SEQ ID NO: 3324 - protein, 119 aa, synthetic construct
EVQLVESGGGVVQPGGSLRLSCAASGRMHSINAMAWFRQVPGKEREFVALISWGNGITYYEDSMKGRFTISRDNAKNTMYLQMNSLRPEDTALYFCAAESYGSSWYFSWGQGTLVTVSS

SEQ ID NO: 3325 - protein, 119 aa, synthetic construct
EVQLVESGGGVVQPGGSLRLSCAASGRMHSINAMAWFRQVPGKEREFVALISWGNGITYYEDSMKGRFTISRDNAKNTMYLQMNSLRPEDTALYFCAAESYGSSWYISWGQGTLVTVSS

SEQ ID NO: 3326 - protein, 119 aa, synthetic construct
EVQLVESGGGVVQPGGSLRLSCAASGRMHSINAMAWFRQVPGKEREFVALISWGNGITYYEDSMKGRFTISRDNAKNTMYLQMNSLRPEDTALYFCAAESYGSSWYGSWGQGTLVTVSS

SEQ ID NO: 3327 - protein, 119 aa, synthetic construct
EVQLVESGGGVVQPGGSLRLSCAASGRMHSINAMAWFRQVPGKEREFVALISWGNGITYYEDSMKGRFTISRDNAKNTMYLQMNSLRPEDTALYFCAAESYGSSWYYSWGQGTLVTVSS

SEQ ID NO: 3328 - protein, 119 aa, synthetic construct
EVQLVESGGGVVQPGGSLRLSCAASGRMHSINAMAWFRQVPGKEREFVALISWGNGITYYEDSMKGRFTISRDNAKNTMYLQMNSLRPEDTALYFCAAESYGSSWYRSWGQGTLVTVSS

SEQ ID NO: 3329 - protein, 119 aa, synthetic construct
EVQLVESGGGVVQPGGSLRLSCAASGRMHSINAMAWFRQVPGKEREFVALISWGNGITYYEDSMKGRFTISRDNAKNTMYLQMNSLRPEDTALYFCAAESYGSSWYVSWGQGTLVTVSS

SEQ ID NO: 3330 - protein, 119 aa, synthetic construct
EVQLVESGGGVVQPGGSLRLSCAASGRMHSINAMAWFRQVPGKEREFVALISWGNGITYYEDSMKGRFTISRDNAKNTMYLQMNSLRPEDTALYFCAAESYGSSWYESWGQGTLVTVSS

SEQ ID NO: 3331 - protein, 119 aa, synthetic construct
EVQLVESGGGVVQPGGSLRLSCAASGRMHSINAMAWFRQVPGKEREFVALISWGNGITYYEDSMKGRFTISRDNAKNTMYLQMNSLRPEDTALYFCAAESYGSSWYHSWGQGTLVTVSS

SEQ ID NO: 3332 - protein, 119 aa, synthetic construct
EVQLVESGGGVVQPGGSLRLSCAASGRMHSINAMAWFRQVPGKEREFVALISWGNGITYYEDSMKGRFTISRDNAKNTMYLQMNSLRPEDTALYFCAAESYGSSWYDDWGQGTLVTVSS

SEQ ID NO: 3333 - protein, 119 aa, synthetic construct
EVQLVESGGGVVQPGGSLRLSCAASGRMHSINAMAWFRQVPGKEREFVALISWGNGITYYEDSMKGRFTISRDNAKNTMYLQMNSLRPEDTALYFCAAESYGSSWYDVWGQGTLVTVSS

SEQ ID NO: 3334 - protein, 119 aa, synthetic construct
EVQLVESGGGVVQPGGSLRLSCAASGRMHSINAMAWFRQVPGKEREFVALISWGNGITYYEDSMKGRFTISRDNAKNTMYLQMNSLRPEDTALYFCAAESYGSSWYDHWGQGTLVTVSS

SEQ ID NO: 3335 - protein, 119 aa, synthetic construct
EVQLVESGGGVVQPGGSLRLSCAASGRMHSINAMAWFRQVPGKEREFVALISWGNGITYYEDSMKGRFTISRDNAKNTMYLQMNSLRPEDTALYFCAAESYGSSWYDAWGQGTLVTVSS

SEQ ID NO: 3336 - protein, 119 aa, synthetic construct
EVQLVESGGGVVQPGGSLRLSCAASGRMHSINAMAWFRQVPGKEREFVALISWGNGITYYEDSMKGRFTISRDNAKNTMYLQMNSLRPEDTALYFCAAESYGSSWYDLWGQGTLVTVSS

SEQ ID NO: 3337 - protein, 119 aa, synthetic construct
EVQLVESGGGVVQPGGSLRLSCAASGRMHSINAMAWFRQVPGKEREFVALISWGNGITYYEDSMKGRFTISRDNAKNTMYLQMNSLRPEDTALYFCAAESYGSSWYDEWGQGTLVTVSS

SEQ ID NO: 3338 - protein, 119 aa, synthetic construct
EVQLVESGGGVVQPGGSLRLSCAASGRMHSINAMAWFRQVPGKEREFVALISWGNGITYYEDSMKGRFTISRDNAKNTMYLQMNSLRPEDTALYFCAAESYGSSWYDTWGQGTLVTVSS

SEQ ID NO: 3339 - protein, 119 aa, synthetic construct
EVQLVESGGGVVQPGGSLRLSCAASGRMHSINAMAWFRQVPGKEREFVALISWGNGITYYEDSMKGRFTISRDNAKNTMYLQMNSLRPEDTALYFCAAESYGSSWYDYWGQGTLVTVSS

SEQ ID NO: 3340 - protein, 119 aa, synthetic construct
EVQLVESGGGVVQPGGSLRLSCAASGRMHSINAMAWFRQVPGKEREFVALISWGNGITYYEDSMKGRFTISRDNAKNTMYLQMNSLRPEDTALYFCAAESYGSSWYDKWGQGTLVTVSS

SEQ ID NO: 3341 - protein, 119 aa, synthetic construct
EVQLVESGGGVVQPGGSLRLSCAASGRMHSINAMAWFRQVPGKEREFVALISWGNGITYYEDSMKGRFTISRDNAKNTMYLQMNSLRPEDTALYFCAAESYGSSWYDFWGQGTLVTVSS

SEQ ID NO: 3342 - protein, 119 aa, synthetic construct
EVQLVESGGGVVQPGGSLRLSCAASGRMHSINAMAWFRQVPGKEREFVALISWGNGITYYEDSMKGRFTISRDNAKNTMYLQMNSLRPEDTALYFCAAESYGSSWYDIWGQGTLVTVSS

SEQ ID NO: 3343 - protein, 119 aa, synthetic construct
EVQLVESGGGVVQPGGSLRLSCAASGRMHSINAMAWFRQVPGKEREFAALISWGNGITYYEDSMKGRFTISRDNAKNTMYLQMNSLRPEDTALYFCAAESYGSSWYDQWGQGTLVTVSS

SEQ ID NO: 3344 - protein, 119 aa, synthetic construct
EVQLVESGGGVVQPGGSLRLSCAASGRMHSINAMAWFRQVPGKEREFVALISWGNGITYYEDSMKGRFTISRDNAKNTMYLQMNSLRPEDTALYFCAAESYGSSWYDRWGQGTLVTVSS

SEQ ID NO: 3345 - protein, 119 aa, synthetic construct
EVQLVESGGGVVQPGGSLRLSCAASGRMHSINAMAWFRQVPGKEREFVALISWGNGITYYEDSMKGRFTISRDNAKNTMYLQMNSLRPEDTALYFCAAESYGSSWYDGWGQGTLVTVSS

SEQ ID NO: 3346 - protein, 119 aa, synthetic construct
EVQLVESEGGVVQPGGSLRLSCAASGRMHSINAMAWFRQVPGKEREFVALISWGNGITYYEDSMKGRFTISRDNAKNTMYLQMNSLRPEDTALYFCAAESYGSSWYDGWGQGTLVTVSS

SEQ ID NO: 3347 - protein, 119 aa, synthetic construct
EVQLVESGGGVVQPGGSLRLSCAASGRMHSINAMAWFRQVPGKEREFVALISWGNGITYYEDSMKGRFTISRDNAKNTMYLQMNSLRPEDTALYFCAAESYGSSWYDPWGQGTLVTVSS

SEQ ID NO: 3348 - protein, 119 aa, synthetic construct
EVQLVESGGGVVQPGGSLRLSCAASGRMHSINAMAWFRQVPGKEREFVALISWGNGITYYEDSMKGRFTISRDNAKNTMYLQMNSLRPEDTALYFCAAESYGKSWYDSWGQGTLVTVSS

SEQ ID NO: 3349 - protein, 119 aa, synthetic construct
EVQLVESGGGVVQPGGSLRLSCAASGRMHSINAMAWFRQVPGKEREFVALISWGNGITYYEDSMKGRFTISRDNAKNTMYLQMNSLRPEDTALYFCAAESYGYSWYDSWGQGTLVTVSS

SEQ ID NO: 3350 - protein, 119 aa, synthetic construct
EVQLVESGGGVVQPGGSLRLSCAASGRMHSINAMAWFRQVPGKEREFVALISWGNGITYYEDSMKGRFTISRDNAKNTMYLQMNSLRPEDTALYFCAAESYGASWYDSWGQGTLVTVSS

SEQ ID NO: 3351 - protein, 119 aa, synthetic construct
EVQLVESGGGVVQPGGSLRLSCAASGRMHSINAMAWFRQVPGKEREFVALISWGNGITYYEDSMKGRFTISRDNAKNTMYLQMNSLRPEDTALYFCAAESYGLSWYDSWGQGTLVTVSS

SEQ ID NO: 3352 - protein, 119 aa, synthetic construct
EVQLVESGGGVVQPGGSLRLSCAASGRMHSINAMAWFRQVPGKEREFVALISWGNGITYYEDSMKGRFTISRDNAKNTMYLQMNSLRPEDTALYFCAAESYGISWYDSWGQGTLVTVSS

SEQ ID NO: 3353 - protein, 119 aa, synthetic construct
EVQLVESGGGVVQPGGSLRLSCAASGRMHSINAMAWFRQVPGKEREFVALISWGNGITYYEDSMKGRFTISRDNAKNTMYLQMNSLRPEDTALYFCAAESYGPSWYDSWGQGTLVTVSS

SEQ ID NO: 3354 - protein, 119 aa, synthetic construct
EVQLVESGGGVVQPGGSLRLSCAASGRMHSINAMAWFRQVPGKEREFVALISWGNGITYYEDSMKGRFTISRDNAKNTMYLQMNSLRPEDTALYFCAAESYGVSWYDSWGQGTLVTVSS

SEQ ID NO: 3355 - protein, 119 aa, synthetic construct
EVQLVESGGGVVQPGGSLRLSCAASGRMHSINAMAWFRQVPGKECEFVALISWGNGITYYEDSMKGRFTISRDNAKNTMYLQMNSLRPEDTALYFCAAESYGDSWYDSWGQGTLVTVSS

SEQ ID NO: 3356 - protein, 119 aa, synthetic construct
EVQLVESGGGVVQPGGSLRLSCAASGRMHSINAMAWFRQVPGKEREFVALISWGNGITYYEDSMKGRFTISRDNAKNTMYLQMNSLRPEDTALYFCAAESYGQSWYDSWGQGTLVTVSS

SEQ ID NO: 3357 - protein, 119 aa, synthetic construct
EVQLVESGGGVVQPGGSLRLSCAASGRMHSINAMAWFRQVPGKEREFVALISWGNGITYYEDSMKGRFTISRDNAKNTMYLQMNSLRPEDTALYFCAAESYGESWYDSWGQGTLVTVSS

SEQ ID NO: 3358 - protein, 119 aa, synthetic construct
EVQLVESGGGVVQPGGSLRLSCAASGRMHSINAMAWFRQVPGKEREFVALISWGNGITYYEDSMKGRFTISRDNAKNTMYLQMNSLRPEDTALYFCAAESYGVSWYDSCGQGTLVTVSS

SEQ ID NO: 3359 - protein, 119 aa, synthetic construct
EVQLVESGGGVVQPGGSLRLSCAASGRMHSINAMAWFRQVPGKEREFVALISWGNGITYYEDSMKGRFTISRDNAKNTMYLQMNSLRPEDTALYFCAAESYGRSWYDSWGQGTLVTVSS

SEQ ID NO: 3360 - protein, 119 aa, synthetic construct
EVQLVESGGGVVQPGGSLRLSCAASGRMHSINAMAWFRQVPGKEREFVALISWGNGITYYEDSMKGRFTISRDNAKNTMYLQMNSLRPEDTALYFCAAESYGTSWYDSWGQGTLVTVSS

SEQ ID NO: 3361 - protein, 119 aa, synthetic construct
EVQLVESGGGVVQPGGSLRLSCAASGRMHSINAMAWFRQVPGKEREFVALISWGNGITYYEDSMKGRFTISRDNAKNTMYLQMNSLRPEDTALYFCAAESYGGSWYDSWGQGTLVTVSS

SEQ ID NO: 3362 - protein, 119 aa, synthetic construct
EVQLVESGGGVVQPGGSLRLSCAASGRMHSINAMAWFRQVPGKEREFVALISWGNGITYYEDSMKGRFTISRDNAKNTMYLQMNSLRPEDTALYFCAAESYGFSWYDSWGQGTLVTVSS

SEQ ID NO: 3363 - protein, 119 aa, synthetic construct
EVQLVESGGGVVQPGGSLRLSCAASGRMHSINAMAWFRQVPGKEREFVALISWGNGITYYEDSMKGRFTISRDNAKNTMYLQMNSLRPEDTALYFCAAESYGSTWYDSWGQGTLVTVSS

SEQ ID NO: 3364 - protein, 119 aa, synthetic construct
EVQLVESGGGVVQPGGSLRLSCAASGRMHSINAMAWFRQVPGKEREFVALISWGNGITYYEDSMKGRFTISRDNAKNTMYLQMNSLRPEDTALYFCAAESYGSKWYDSWGQGTLVTVSS

SEQ ID NO: 3365 - protein, 119 aa, synthetic construct
EVQLVESGGGVVQPGGSLRLSCAASGRMHSINAMAWFRQVPGKEREFVALISWGNGITYYEDSMKGRFTISRDNAKNTMYLQMNSLRPEDTALYFCAAESYGSPWYDSWGQGTLVTVSS

SEQ ID NO: 3366 - protein, 119 aa, synthetic construct
EVQLVESGGGVVQPGGSLRLSCAASGRMHSINAMAWFRQVPGKEREFVALISWGNGITYYEDSMKGRFTISRDNAKNTMYLQMNSLRPEDTALYFCAAESYGSHWYDSWGQGTLVTVSS

SEQ ID NO: 3367 - protein, 119 aa, synthetic construct
EVQLVESGGGVVQPGGSLRLSCAASGRMHSINAMAWFRQVPGKEREFVALISWGNGITYYEDSMKGRFTISRDNAKNTMYLQMNSLRPEDTALYFCAAESYGSIWYDSWGQGTLVTVSS

SEQ ID NO: 3368 - protein, 119 aa, synthetic construct
EVQLVESGGGVVQPGGSLRLSCAASGRMHSINAMAWFRQVPGKEREFVALISWGNGITYYEDSMKGRFTISRDNAKNTMYLQMNSLRPEDTALYFCAAESYGSTWYDSWCQGTLVTVSS

SEQ ID NO: 3369 - protein, 119 aa, synthetic construct
EVQLVESGGGVVQPGGSLRLSCAASGRMHSINAMAWFRQVPGKEREFVALISWGNGITYYEDSMKGRFTISRDNAKNTMYLQMNSLRPEDTALYFCAAESYGSGWYDSWGQGTLVTVSS

SEQ ID NO: 3370 - protein, 119 aa, synthetic construct
EVQLVESGGGVVQPGGSLRLSCAASGRMHSINAMAWFRQVPGKEREFVALISWGNGITYYEDSMKGRFTISRDNAKNTMYLQMNSLRPEDTALYFCAAESYGSVWYDSWGQGTLVTVSS

SEQ ID NO: 3371 - protein, 119 aa, synthetic construct
EVQLVESGGGVVQPGGSLRLSCAASGRMHSINAMAWFRQVPGKEREFVALISWGNGITYYEDSMKGRFTISRDNAKNTMYLQMNSLRPEDTALYFCAAESYGSQWYDSWGQGTLVTVSS

SEQ ID NO: 3372 - protein, 119 aa, synthetic construct
EVQLVESGGGVVQPGGSLRLSCAASGRMHSINAMAWFRQVPGKEREFVALISWGNGITYYEDSMKGRFTISRDNAKNTMYLQMNSLRPEDTALYFCAAESYGSRWYDSWGQGTLVTVSS

SEQ ID NO: 3373 - protein, 119 aa, synthetic construct
EVQLVESGGGVVQPGGSLRLSCAASGRMHSINAMAWFRQVPGKEREFVALISWGNGITYYEDSMKGRFTISRDNAKNTMYLQMNSLRPEDTALYFCAAESYGSDWYDSWGQGTLVTVSS

SEQ ID NO: 3374 - protein, 119 aa, synthetic construct
EVQLVESGGGVVQPGGSLRLSCAASGRMHSINAMAWFRQVPGKEREFVALISWGNGITYYEDSMKGRFTISRDNAKNTMYLQMNSLRPEDTALYFCAAESYGSLWYDSWGQGTLVTVSS

SEQ ID NO: 3375 - protein, 119 aa, synthetic construct
EVQLVESGGGVVQPGGSLRLSCAASGRMHSINAMAWFRQVPGKEREFVALISWGNGITYYEDSMKGRFTISRDNAKNTMYLQMNSLRPEDTALYFCAAESYGSEWYDSWGQGTLVTVSS

SEQ ID NO: 3376 - protein, 119 aa, synthetic construct
EVQLVESGGGVVQPGGSLRLSCAASGRMHSINAMAWFRQAPGKEREFVALISWGNGITYYADSVKGRFTISRDNAKNTLYLQMNSLRPEDTALYYCAAESYGSSWYDSWGQGTLVTVSS

SEQ ID NO: 3377 - protein, 119 aa, synthetic construct
EVQLVESGGGVVQPGGSLRLSCAASGRMHSINAMAWFRQAPGKEREFVALISWGNGITYYADSVKGRFTISRDNAKNTVYLQMNSLRPEDTALYYCAAESYGSSWYDSWGQGTLVTVSS

SEQ ID NO: 3378 - protein, 119 aa, synthetic construct
EVQLVESGGGVVQPGGSLRLSCAASGRMHSINAMAWFRQAPGKEREFVALISWGNGITYYEDSVKGRFTISRDNAKNTLYLQMNSLRPEDTALYYCAAESYGSSWYDSWGQGTLVTVSS

SEQ ID NO: 3379 - protein, 119 aa, synthetic construct
EVQLVESGGGVVQPGGSLRLSCAASGRMHSINAMAWFRQAPGKEREFVALISWGNGITYYEDSVKGRFTISRDNAKNTVYLQMNSLRPEDTALYYCAAESYGSSWYDSWGQGTLVTVSS

SEQ ID NO: 3380 - protein, 119 aa, synthetic construct
EVQLVESGGGVVQPGGSLRLSCAASGRMHSINAMAWFRQAPGKEREFVALISWGNGITYYAASVKGRFTISRDNAKNTMYLQMNSLRPEDTALYYCAAESYGSSWYDSWGQGTLVTVSS

SEQ ID NO: 3381 - protein, 119 aa, synthetic construct
EVQLVESGGGVVQPGGSLRLSCAASGRMHSINAMAWFRQAPGKEREFVALISWGNGITYYAESVKGRFTISRDNAKNTMYLQMNSLRPEDTALYYCAAESYGSSWYDSWGQGTLVTVSS

SEQ ID NO: 3382 - protein, 119 aa, synthetic construct
EVQLVESGGGVVQPGGSLRLSCAASGRMHSINAMAWFRQAPGKEREFVALISWGNGITYYAFSVKGRFTISRDNAKNTMYLQMNSLRPEDTALYYCAAESYGSSWYDSWGQGTLVTVSS

SEQ ID NO: 3383 - protein, 119 aa, synthetic construct
EVQLVESGGGVVQPGGSLRLSCAASGRMHSINAMAWFRQAPGKEREFVALISWGNGITYYAGSVKGRFTISRDNAKNTMYLQMNSLRPEDTALYYCAAESYGSSWYDSWGQGTLVTVSS

SEQ ID NO: 3384 - protein, 119 aa, synthetic construct
EVQLVESGGGVVQPGGSLRLSCAASGRMHSINAMAWFRQAPGKEREFVALISWGNGITYYAHSVKGRFTISRDNAKNTMYLQMNSLRPEDTALYYCAAESYGSSWYDSWGQGTLVTVSS

SEQ ID NO: 3385 - protein, 119 aa, synthetic construct
EVQLVESGGGVVQPGGSLRLSCAASGRMHSINAMAWFRQAPGKEREFVALISWGNGITYYAISVKGRFTISRDNAKNTMYLQMNSLRPEDTALYYCAAESYGSSWYDSWGQGTLVTVSS

SEQ ID NO: 3386 - protein, 119 aa, synthetic construct
EVQLVESGGGVVQPGGSLRLSCAASGRMHSINAMAWFRQAPGKEREFVALISWGNGITYYAKSVKGRFTISRDNAKNTMYLQMNSLRPEDTALYYCAAESYGSSWYDSWGQGTLVTVSS

SEQ ID NO: 3387 - protein, 119 aa, synthetic construct
EVQLVESGGGVVQPGGSLRLSCAASGRMHSINAMAWFRQAPGKEREFVALISWGNGITYYALSVKGRFTISRDNAKNTMYLQMNSLRPEDTALYYCAAESYGSSWYDSWGQGTLVTVSS

SEQ ID NO: 3388 - protein, 119 aa, synthetic construct
EVQLVESGGGVVQPGGSLRLSCAASGRMHSINAMAWFRQAPGKEREFVALISWGNGITYYAPSVKGRFTISRDNAKNTMYLQMNSLRPEDTALYYCAAESYGSSWYDSWGQGTLVTVSS

SEQ ID NO: 3389 - protein, 119 aa, synthetic construct
EVQLVESGGGVVQPGGSLRLSCAASGRMHSINAMAWFRQAPGKEREFVALISWGNGITYYAQSVKGRFTISRDNAKNTMYLQMNSLRPEDTALYYCAAESYGSSWYDSWGQGTLVTVSS

SEQ ID NO: 3390 - protein, 119 aa, synthetic construct
EVQLVESGGGVVQPGGSLRLSCAASGRMHSINAMAWFRQAPGKEREFVALISWGNGITYYARSVKGRFTISRDNAKNTMYLQMNSLRPEDTALYYCAAESYGSSWYDSWGQGTLVTVSS

SEQ ID NO: 3391 - protein, 119 aa, synthetic construct
EVQLVESGGGVVQPGGSLRLSCAASGRMHSINAMAWFRQAPGKEREFVALISWGNGITYYASSVKGRFTISRDNAKNTMYLQMNSLRPEDTALYYCAAESYGSSWYDSWGQGTLVTVSS

SEQ ID NO: 3392 - protein, 119 aa, synthetic construct
EVQLVESGGGVVQPGGSLRLSCAASGRMHSINAMAWFRQAPGKEREFVALISWGNGITYYATSVKGRFTISRDNAKNTMYLQMNSLRPEDTALYYCAAESYGSSWYDSWGQGTLVTVSS

SEQ ID NO: 3393 - protein, 119 aa, synthetic construct
EVQLVESGGGVVQPGGSLRLSCAASGRMHSINAMAWFRQAPGKEREFVALISWGNGITYYAVSVKGRFTISRDNAKNTMYLQMNSLRPEDTALYYCAAESYGSSWYDSWGQGTLVTVSS

SEQ ID NO: 3394 - protein, 119 aa, synthetic construct
EVQLVESGGGVVQPGGSLRLSCAASGRMHSINAMAWFRQAPGKEREFVALISWGNGITYYAYSVKGRFTISRDNAKNTMYLQMNSLRPEDTALYYCAAESYGSSWYDSWGQGTLVTVSS

SEQ ID NO: 3395 - protein, 119 aa, synthetic construct
EVQLVESGGGLVQTGGSLRLSCAASGRMHSINAMAWFRQVPGKEREFVALISWGNGITYYEDSMKGRFTISRDNAKNTMYLQMNSLKPEDTARYFCAAESYGSSWYDSWGQGTLVTVSS

SEQ ID NO: 3396 - protein, 119 aa, synthetic construct
EVQLVESGGGVVQPGGSLRLSCAASGRVHSINAMAWFRQAPGKEREFVALISWGFGITYYAGSVKGRFTISRDNAKNTLYLQMNSLRPEDTALYYCAAESYGSSWYDSWGQGTLVTVSS

SEQ ID NO: 3397 - protein, 119 aa, synthetic construct
EVQLVESGGGVVQPGGSLRLSCAASGRTHSINAMAWFRQAPGKEREFVALISWGFGITYYAGSVKGRFTISRDNAKNTLYLQMNSLRPEDTALYYCAAESYGSSWYDSWGQGTLVTVSS

SEQ ID NO: 3398 - protein, 119 aa, synthetic construct
EVQLVESGGGVVQPGGSLRLSCAASGRTHSINAMAWFRQAPGKEREFVALISWGFGITYYAESVKGRFTISRDNAKNTLYLQMNSLRPEDTALYYCAAESYGSSWYDSWGQGTLVTVSS

SEQ ID NO: 3399 - protein, 119 aa, synthetic construct
EVQLVESGGGVVQPGGSLRLSCAASGRVHSINAMAWFRQAPGKEREFVALISWGEGITYYAESVKGRFTISRDNAKNTLYLQMNSLRPEDTALYYCAAESYGSSWYDSWGQGTLVTVSS

SEQ ID NO: 3400 - protein, 119 aa, synthetic construct
EVQLVESGGGVVQPGGSLRLSCAASGRVHSINAMAWFRQAPGKEREFVALISWGFGITYYAESVKGRFTISRDNAKNTLYLQMNSLRPEDTALYYCAAESYGSSWYDSWGQGTLVTVSS

SEQ ID NO: 3401 - protein, 119 aa, synthetic construct
EVQLVESGGGVVQPGGSLRLSCAASGRTHSINAMAWFRQAPGKEREFVALISWGEGITYYAESVKGRFTISRDNAKNTLYLQMNSLRPEDTALYYCAAESYGSSWYDSWGQGTLVTVSS

SEQ ID NO: 3402 - protein, 119 aa, synthetic construct
EVQLVESGGGVVQPGGSLRLSCAASGRVHSINAMAWFRQAPGKEREFVALISWGEGITYYAGSVKGRFTISRDNAKNTLYLQMNSLRPEDTALYYCAAESYGSSWYDSWGQGTLVTVSS

SEQ ID NO: 3403 - protein, 119 aa, synthetic construct
EVQLVESGGGVVQPGGSLRLSCAASGRTHSINAMAWFRQAPGKEREFVALISWGEGITYYAGSVKGRFTISRDNAKNTLYLQMNSLRPEDTALYYCAAESYGSSWYDSWGQGTLVTVSS

SEQ ID NO: 3404 - protein, 119 aa, synthetic construct
EVQLVESGGGVVQPGGSLRLSCAASGRTHSINAMAWFRQAPGKEREFVALISWGEGITYYAESVKGRFTISRDNAKNTLYLQMNSLRPEDTALYYCAPESYGSSWYDSWGQGTLVTVSS

SEQ ID NO: 3405 - protein, 119 aa, synthetic construct
EVQLVESGGGVVQPGGSLRLSCAASGRVHSINAMAWFRQAPGKEREFVALISWGEGITYYAESVKGRFTISRDNAKNTLYLQMNSLRPEDTALYYCAPESYGSSWYDSWGQGTLVTVSS

SEQ ID NO: 3406 - protein, 119 aa, synthetic construct
EVQLVESGGGVVQPGGSLRLSCAASGRTHSINAMAWFRQAPGKEREFVALISWGFGITYYAESVKGRFTISRDNAKNTLYLQMNSLRPEDTALYYCAPESYGSSWYDSWGQGTLVTVSS

SEQ ID NO: 3407 - protein, 119 aa, synthetic construct
EVQLVESGGGVVQPGGSLRLSCAASGRVHSINAMAWFRQAPGKEREFVALISWGFGITYYAESVKGRFTISRDNAKNTLYLQMNSLRPEDTALYYCAPESYGSSWYDSWGQGTLVTVSS

SEQ ID NO: 3408 - protein, 119 aa, synthetic construct
EVQLVESGGGVVQPGGSLRLSCAASGRTHSINAMAWFRQAPGKEREFVALISWGEGITYYAGSVKGRFTISRDNAKNTLYLQMNSLRPEDTALYYCAPESYGSSWYDSWGQGTLVTVSS

SEQ ID NO: 3409 - protein, 119 aa, synthetic construct
EVQLVESGGGVVQPGGSLRLSCAASGRVHSINAMAWFRQAPGKEREFVALISWGEGITYYAGSVKGRFTISRDNAKNTLYLQMNSLRPEDTALYYCAPESYGSSWYDSWGQGTLVTVSS

SEQ ID NO: 3410 - protein, 119 aa, synthetic construct
EVQLVESGGGVVQPGGSLRLSCAASGRTHSINAMAWFRQAPGKEREFVALISWGFGITYYAGSVKGRFTISRDNAKNTLYLQMNSLRPEDTALYYCAPESYGSSWYDSWGQGTLVTVSS

SEQ ID NO: 3411 - protein, 119 aa, synthetic construct
EVQLVESGGGVVQPGGSLRLSCAASGRVHSINAMAWFRQAPGKEREFVALISWGFGITYYAGSVKGRFTISRDNAKNTLYLQMNSLRPEDTALYYCAPESYGSSWYDSWGQGTLVTVSS

SEQ ID NO: 3412 - protein, 119 aa, synthetic construct
EVQLVESGGGVVQPGGSLRLSCAASGRTHSINAMAWFRQAPGKEREFVALISWGEGITYYAESVKGRFTISRDNAKNTLYLQMNSLRPEDTALYYCAAESYHSSWYDSWGQGTLVTVSS

SEQ ID NO: 3413 - protein, 119 aa, synthetic construct
EVQLVESGGGVVQPGGSLRLSCAASGRVHSINAMAWFRQAPGKEREFVALISWGEGITYYAESVKGRFTISRDNAKNTLYLQMNSLRPEDTALYYCAAESYHSSWYDSWGQGTLVTVSS

SEQ ID NO: 3414 - protein, 119 aa, synthetic construct
EVQLVESGGGVVQPGGSLRLSCAASGRTHSINAMAWFRQAPGKEREFVALISWGFGITYYAESVKGRFTISRDNAKNTLYLQMNSLRPEDTALYYCAAESYHSSWYDSWGQGTLVTVSS

SEQ ID NO: 3415 - protein, 119 aa, synthetic construct
EVQLVESGGGVVQPGGSLRLSCAASGRVHSINAMAWFRQAPGKEREFVALISWGFGITYYAESVKGRFTISRDNAKNTLYLQMNSLRPEDTALYYCAAESYHSSWYDSWGQGTLVTVSS

SEQ ID NO: 3416 - protein, 119 aa, synthetic construct
EVQLVESGGGVVQPGGSLRLSCAASGRTHSINAMAWFRQAPGKEREFVALISWGEGITYYAGSVKGRFTISRDNAKNTLYLQMNSLRPEDTALYYCAAESYHSSWYDSWGQGTLVTVSS

SEQ ID NO: 3417 - protein, 119 aa, synthetic construct
EVQLVESGGGVVQPGGSLRLSCAASGRVHSINAMAWFRQAPGKEREFVALISWGEGITYYAGSVKGRFTISRDNAKNTLYLQMNSLRPEDTALYYCAAESYHSSWYDSWGQGTLVTVSS

SEQ ID NO: 3418 - protein, 119 aa, synthetic construct
EVQLVESGGGVVQPGGSLRLSCAASGRTHSINAMAWFRQAPGKEREFVALISWGFGITYYAGSVKGRFTISRDNAKNTLYLQMNSLRPEDTALYYCAAESYHSSWYDSWGQGTLVTVSS

SEQ ID NO: 3419 - protein, 119 aa, synthetic construct
EVQLVESGGGVVQPGGSLRLSCAASGRVHSINAMAWFRQAPGKEREFVALISWGFGITYYAGSVKGRFTISRDNAKNTLYLQMNSLRPEDTALYYCAAESYHSSWYDSWGQGTLVTVSS

SEQ ID NO: 3420 - protein, 119 aa, synthetic construct
EVQLVESGGGVVQPGGSLRLSCAASGRTHSINAMAWFRQAPGKEREFVALISWGEGITYYAESVKGRFTISRDNAKNTLYLQMNSLRPEDTALYYCAPESYHSSWYDSWGQGTLVTVSS

SEQ ID NO: 3421 - protein, 119 aa, synthetic construct
EVQLVESGGGVVQPGGSLRLSCAASGRVHSINAMAWFRQAPGKEREFVALISWGEGITYYAESVKGRFTISRDNAKNTLYLQMNSLRPEDTALYYCAPESYHSSWYDSWGQGTLVTVSS

SEQ ID NO: 3422 - protein, 119 aa, synthetic construct
EVQLVESGGGVVQPGGSLRLSCAASGRTHSINAMAWFRQAPGKEREFVALISWGFGITYYAESVKGRFTISRDNAKNTLYLQMNSLRPEDTALYYCAPESYHSSWYDSWGQGTLVTVSS

SEQ ID NO: 3423 - protein, 119 aa, synthetic construct
EVQLVESGGGVVQPGGSLRLSCAASGRVHSINAMAWFRQAPGKEREFVALISWGFGITYYAESVKGRFTISRDNAKNTLYLQMNSLRPEDTALYYCAPESYHSSWYDSWGQGTLVTVSS

SEQ ID NO: 3424 - protein, 119 aa, synthetic construct
EVQLVESGGGVVQPGGSLRLSCAASGRTHSINAMAWFRQAPGKEREFVALISWGEGITYYAGSVKGRFTISRDNAKNTLYLQMNSLRPEDTALYYCAPESYHSSWYDSWGQGTLVTVSS

SEQ ID NO: 3425 - protein, 119 aa, synthetic construct
EVQLVESGGGVVQPGGSLRLSCAASGRVHSINAMAWFRQAPGKEREFVALISWGEGITYYAGSVKGRFTISRDNAKNTLYLQMNSLRPEDTALYYCAPESYHSSWYDSWGQGTLVTVSS

SEQ ID NO: 3426 - protein, 119 aa, synthetic construct
EVQLVESGGGVVQPGGSLRLSCAASGRTHSINAMAWFRQAPGKEREFVALISWGFGITYYAGSVKGRFTISRDNAKNTLYLQMNSLRPEDTALYYCAPESYHSSWYDSWGQGTLVTVSS

SEQ ID NO: 3427 - protein, 119 aa, synthetic construct
EVQLVESGGGVVQPGGSLRLSCAASGRVHSINAMAWFRQAPGKEREFVALISWGFGITYYAGSVKGRFTISRDNAKNTLYLQMNSLRPEDTALYYCAPESYHSSWYDSWGQGTLVTVSS

SEQ ID NO: 3428 - protein, 119 aa, synthetic construct
EVQLVESGGGVVQPGGSLRLSCAASGRTHSINAMAWFRQAPGKEREFVALISWGEGITYYAESVKGRFTISRDNAKNTLYLQMNSLRPEDTALYYCAAESYRSSWYDSWGQGTLVTVSS

SEQ ID NO: 3429 - protein, 119 aa, synthetic construct
EVQLVESGGGVVQPGGSLRLSCAASGRVHSINAMAWFRQAPGKEREFVALISWGEGITYYAESVKGRFTISRDNAKNTLYLQMNSLRPEDTALYYCAAESYRSSWYDSWGQGTLVTVSS

SEQ ID NO: 3430 - protein, 119 aa, synthetic construct
EVQLVESGGGVVQPGGSLRLSCAASGRTHSINAMAWFRQAPGKEREFVALISWGFGITYYAESVKGRFTISRDNAKNTLYLQMNSLRPEDTALYYCAAESYRSSWYDSWGQGTLVTVSS

SEQ ID NO: 3431 - protein, 119 aa, synthetic construct
EVQLVESGGGVVQPGGSLRLSCAASGRVHSINAMAWFRQAPGKEREFVALISWGFGITYYAESVKGRFTISRDNAKNTLYLQMNSLRPEDTALYYCAAESYRSSWYDSWGQGTLVTVSS

SEQ ID NO: 3432 - protein, 119 aa, synthetic construct
EVQLVESGGGVVQPGGSLRLSCAASGRTHSINAMAWFRQAPGKEREFVALISWGEGITYYAGSVKGRFTISRDNAKNTLYLQMNSLRPEDTALYYCAAESYRSSWYDSWGQGTLVTVSS

SEQ ID NO: 3433 - protein, 119 aa, synthetic construct
EVQLVESGGGVVQPGGSLRLSCAASGRVHSINAMAWFRQAPGKEREFVALISWGEGITYYAGSVKGRFTISRDNAKNTLYLQMNSLRPEDTALYYCAAESYRSSWYDSWGQGTLVTVSS

SEQ ID NO: 3434 - protein, 119 aa, synthetic construct
EVQLVESGGGVVQPGGSLRLSCAASGRTHSINAMAWFRQAPGKEREFVALISWGFGITYYAGSVKGRFTISRDNAKNTLYLQMNSLRPEDTALYYCAAESYRSSWYDSWGQGTLVTVSS

SEQ ID NO: 3435 - protein, 119 aa, synthetic construct
EVQLVESGGGVVQPGGSLRLSCAASGRVHSINAMAWFRQAPGKEREFVALISWGFGITYYAGSVKGRFTISRDNAKNTLYLQMNSLRPEDTALYYCAAESYRSSWYDSWGQGTLVTVSS

SEQ ID NO: 3436 - protein, 119 aa, synthetic construct
EVQLVESGGGVVQPGGSLRLSCAASGRTHSINAMAWFRQAPGKEREFVALISWGEGITYYAESVKGRFTISRDNAKNTLYLQMNSLRPEDTALYYCAPESYRSSWYDSWGQGTLVTVSS

SEQ ID NO: 3437 - protein, 119 aa, synthetic construct
EVQLVESGGGVVQPGGSLRLSCAASGRVHSINAMAWFRQAPGKEREFVALISWGEGITYYAESVKGRFTISRDNAKNTLYLQMNSLRPEDTALYYCAPESYRSSWYDSWGQGTLVTVSS

SEQ ID NO: 3438 - protein, 119 aa, synthetic construct
EVQLVESGGGVVQPGGSLRLSCAASGRTHSINAMAWFRQAPGKEREFVALISWGFGITYYAESVKGRFTISRDNAKNTLYLQMNSLRPEDTALYYCAPESYRSSWYDSWGQGTLVTVSS

SEQ ID NO: 3439 - protein, 119 aa, synthetic construct
EVQLVESGGGVVQPGGSLRLSCAASGRVHSINAMAWFRQAPGKEREFVALISWGFGITYYAESVKGRFTISRDNAKNTLYLQMNSLRPEDTALYYCAPESYRSSWYDSWGQGTLVTVSS

SEQ ID NO: 3440 - protein, 119 aa, synthetic construct
EVQLVESGGGVVQPGGSLRLSCAASGRTHSINAMAWFRQAPGKEREFVALISWGEGITYYAGSVKGRFTISRDNAKNTLYLQMNSLRPEDTALYYCAPESYRSSWYDSWGQGTLVTVSS

SEQ ID NO: 3441 - protein, 119 aa, synthetic construct
EVQLVESGGGVVQPGGSLRLSCAASGRVHSINAMAWFRQAPGKEREFVALISWGEGITYYAGSVKGRFTISRDNAKNTLYLQMNSLRPEDTALYYCAPESYRSSWYDSWGQGTLVTVSS

SEQ ID NO: 3442 - protein, 119 aa, synthetic construct
EVQLVESGGGVVQPGGSLRLSCAASGRTHSINAMAWFRQAPGKEREFVALISWGFGITYYAGSVKGRFTISRDNAKNTLYLQMNSLRPEDTALYYCAPESYRSSWYDSWGQGTLVTVSS

SEQ ID NO: 3443 - protein, 119 aa, synthetic construct
EVQLVESGGGVVQPGGSLRLSCAASGRVHSINAMAWFRQAPGKEREFVALISWGFGITYYAGSVKGRFTISRDNAKNTLYLQMNSLRPEDTALYYCAPESYRSSWYDSWGQGTLVTVSS

SEQ ID NO: 3444 - protein, 119 aa, synthetic construct
EVQLVESGGGVVQPGGSLRLSCAASGRTHSINAMAWFRQAPGKEREFVALISWGEGITYYAESVKGRFTISRDNAKNTLYLQMNSLRPEDTALYYCAAESYGASWYDSWGQGTLVTVSS

SEQ ID NO: 3445 - protein, 119 aa, synthetic construct
EVQLVESGGGVVQPGGSLRLSCAASGRVHSINAMAWFRQAPGKEREFVALISWGEGITYYAESVKGRFTISRDNAKNTLYLQMNSLRPEDTALYYCAAESYGASWYDSWGQGTLVTVSS

SEQ ID NO: 3446 - protein, 119 aa, synthetic construct
EVQLVESGGGVVQPGGSLRLSCAASGRTHSINAMAWFRQAPGKEREFVALISWGFGITYYAESVKGRFTISRDNAKNTLYLQMNSLRPEDTALYYCAAESYGASWYDSWGQGTLVTVSS

SEQ ID NO: 3447 - protein, 119 aa, synthetic construct
EVQLVESGGGVVQPGGSLRLSCAASGRVHSINAMAWFRQAPGKEREFVALISWGFGITYYAESVKGRFTISRDNAKNTLYLQMNSLRPEDTALYYCAAESYGASWYDSWGQGTLVTVSS

SEQ ID NO: 3448 - protein, 119 aa, synthetic construct
EVQLVESGGGVVQPGGSLRLSCAASGRTHSINAMAWFRQAPGKEREFVALISWGEGITYYAGSVKGRFTISRDNAKNTLYLQMNSLRPEDTALYYCAAESYGASWYDSWGQGTLVTVSS

SEQ ID NO: 3449 - protein, 119 aa, synthetic construct
EVQLVESGGGVVQPGGSLRLSCAASGRVHSINAMAWFRQAPGKEREFVALISWGEGITYYAGSVKGRFTISRDNAKNTLYLQMNSLRPEDTALYYCAAESYGASWYDSWGQGTLVTVSS

SEQ ID NO: 3450 - protein, 119 aa, synthetic construct
EVQLVESGGGVVQPGGSLRLSCAASGRTHSINAMAWFRQAPGKEREFVALISWGFGITYYAGSVKGRFTISRDNAKNTLYLQMNSLRPEDTALYYCAAESYGASWYDSWGQGTLVTVSS

SEQ ID NO: 3451 - protein, 119 aa, synthetic construct
EVQLVESGGGVVQPGGSLRLSCAASGRVHSINAMAWFRQAPGKEREFVALISWGFGITYYAGSVKGRFTISRDNAKNTLYLQMNSLRPEDTALYYCAAESYGASWYDSWGQGTLVTVSS

SEQ ID NO: 3452 - protein, 119 aa, synthetic construct
EVQLVESGGGVVQPGGSLRLSCAASGRTHSINAMAWFRQAPGKEREFVALISWGEGITYYAESVKGRFTISRDNAKNTLYLQMNSLRPEDTALYYCAPESYGASWYDSWGQGTLVTVSS

SEQ ID NO: 3453 - protein, 119 aa, synthetic construct
EVQLVESGGGVVQPGGSLRLSCAASGRVHSINAMAWFRQAPGKEREFVALISWGEGITYYAESVKGRFTISRDNAKNTLYLQMNSLRPEDTALYYCAPESYGASWYDSWGQGTLVTVSS

SEQ ID NO: 3454 - protein, 119 aa, synthetic construct
EVQLVESGGGVVQPGGSLRLSCAASGRTHSINAMAWFRQAPGKEREFVALISWGFGITYYAESVKGRFTISRDNAKNTLYLQMNSLRPEDTALYYCAPESYGASWYDSWGQGTLVTVSS

SEQ ID NO: 3455 - protein, 119 aa, synthetic construct
EVQLVESGGGVVQPGGSLRLSCAASGRVHSINAMAWFRQAPGKEREFVALISWGFGITYYAESVKGRFTISRDNAKNTLYLQMNSLRPEDTALYYCAPESYGASWYDSWGQGTLVTVSS

SEQ ID NO: 3456 - protein, 119 aa, synthetic construct
EVQLVESGGGVVQPGGSLRLSCAASGRTHSINAMAWFRQAPGKEREFVALISWGEGITYYAGSVKGRFTISRDNAKNTLYLQMNSLRPEDTALYYCAPESYGASWYDSWGQGTLVTVSS

SEQ ID NO: 3457 - protein, 119 aa, synthetic construct
EVQLVESGGGVVQPGGSLRLSCAASGRVHSINAMAWFRQAPGKEREFVALISWGEGITYYAGSVKGRFTISRDNAKNTLYLQMNSLRPEDTALYYCAPESYGASWYDSWGQGTLVTVSS

SEQ ID NO: 3458 - protein, 119 aa, synthetic construct
EVQLVESGGGVVQPGGSLRLSCAASGRTHSINAMAWFRQAPGKEREFVALISWGFGITYYAGSVKGRFTISRDNAKNTLYLQMNSLRPEDTALYYCAPESYGASWYDSWGQGTLVTVSS

SEQ ID NO: 3459 - protein, 119 aa, synthetic construct
EVQLVESGGGVVQPGGSLRLSCAASGRVHSINAMAWFRQAPGKEREFVALISWGFGITYYAGSVKGRFTISRDNAKNTLYLQMNSLRPEDTALYYCAPESYGASWYDSWGQGTLVTVSS

SEQ ID NO: 3460 - protein, 119 aa, synthetic construct
EVQLVESGGGVVQPGGSLRLSCAASGRTHSINAMAWFRQAPGKEREFVALISWGEGITYYAESVKGRFTISRDNAKNTLYLQMNSLRPEDTALYYCAAESYHASWYDSWGQGTLVTVSS

SEQ ID NO: 3461 - protein, 119 aa, synthetic construct
EVQLVESGGGVVQPGGSLRLSCAASGRVHSINAMAWFRQAPGKEREFVALISWGEGITYYAESVKGRFTISRDNAKNTLYLQMNSLRPEDTALYYCAAESYHASWYDSWGQGTLVTVSS

SEQ ID NO: 3462 - protein, 119 aa, synthetic construct
EVQLVESGGGVVQPGGSLRLSCAASGRTHSINAMAWFRQAPGKEREFVALISWGFGITYYAESVKGRFTISRDNAKNTLYLQMNSLRPEDTALYYCAAESYHASWYDSWGQGTLVTVSS

SEQ ID NO: 3463 - protein, 119 aa, synthetic construct
EVQLVESGGGVVQPGGSLRLSCAASGRVHSINAMAWFRQAPGKEREFVALISWGFGITYYAESVKGRFTISRDNAKNTLYLQMNSLRPEDTALYYCAAESYHASWYDSWGQGTLVTVSS

SEQ ID NO: 3464 - protein, 119 aa, synthetic construct
EVQLVESGGGVVQPGGSLRLSCAASGRTHSINAMAWFRQAPGKEREFVALISWGEGITYYAGSVKGRFTISRDNAKNTLYLQMNSLRPEDTALYYCAAESYHASWYDSWGQGTLVTVSS

SEQ ID NO: 3465 - protein, 119 aa, synthetic construct
EVQLVESGGGVVQPGGSLRLSCAASGRVHSINAMAWFRQAPGKEREFVALISWGEGITYYAGSVKGRFTISRDNAKNTLYLQMNSLRPEDTALYYCAAESYHASWYDSWGQGTLVTVSS

SEQ ID NO: 3466 - protein, 119 aa, synthetic construct
EVQLVESGGGVVQPGGSLRLSCAASGRTHSINAMAWFRQAPGKEREFVALISWGFGITYYAGSVKGRFTISRDNAKNTLYLQMNSLRPEDTALYYCAAESYHASWYDSWGQGTLVTVSS

SEQ ID NO: 3467 - protein, 119 aa, synthetic construct
EVQLVESGGGVVQPGGSLRLSCAASGRVHSINAMAWFRQAPGKEREFVALISWGFGITYYAGSVKGRFTISRDNAKNTLYLQMNSLRPEDTALYYCAAESYHASWYDSWGQGTLVTVSS

SEQ ID NO: 3468 - protein, 119 aa, synthetic construct
EVQLVESGGGVVQPGGSLRLSCAASGRTHSINAMAWFRQAPGKEREFVALISWGEGITYYAESVKGRFTISRDNAKNTLYLQMNSLRPEDTALYYCAPESYHASWYDSWGQGTLVTVSS

SEQ ID NO: 3469 - protein, 119 aa, synthetic construct
EVQLVESGGGVVQPGGSLRLSCAASGRVHSINAMAWFRQAPGKEREFVALISWGEGITYYAESVKGRFTISRDNAKNTLYLQMNSLRPEDTALYYCAPESYHASWYDSWGQGTLVTVSS

SEQ ID NO: 3470 - protein, 119 aa, synthetic construct
EVQLVESGGGVVQPGGSLRLSCAASGRTHSINAMAWFRQAPGKEREFVALISWGFGITYYAESVKGRFTISRDNAKNTLYLQMNSLRPEDTALYYCAPESYHASWYDSWGQGTLVTVSS

SEQ ID NO: 3471 - protein, 119 aa, synthetic construct
EVQLVESGGGVVQPGGSLRLSCAASGRVHSINAMAWFRQAPGKEREFVALISWGFGITYYAESVKGRFTISRDNAKNTLYLQMNSLRPEDTALYYCAPESYHASWYDSWGQGTLVTVSS

SEQ ID NO: 3472 - protein, 119 aa, synthetic construct
EVQLVESGGGVVQPGGSLRLSCAASGRTHSINAMAWFRQAPGKEREFVALISWGEGITYYAGSVKGRFTISRDNAKNTLYLQMNSLRPEDTALYYCAPESYHASWYDSWGQGTLVTVSS

SEQ ID NO: 3473 - protein, 119 aa, synthetic construct
EVQLVESGGGVVQPGGSLRLSCAASGRVHSINAMAWFRQAPGKEREFVALISWGEGITYYAGSVKGRFTISRDNAKNTLYLQMNSLRPEDTALYYCAPESYHASWYDSWGQGTLVTVSS

SEQ ID NO: 3474 - protein, 119 aa, synthetic construct
EVQLVESGGGVVQPGGSLRLSCAASGRTHSINAMAWFRQAPGKEREFVALISWGFGITYYAGSVKGRFTISRDNAKNTLYLQMNSLRPEDTALYYCAPESYHASWYDSWGQGTLVTVSS

SEQ ID NO: 3475 - protein, 119 aa, synthetic construct
EVQLVESGGGVVQPGGSLRLSCAASGRVHSINAMAWFRQAPGKEREFVALISWGFGITYYAGSVKGRFTISRDNAKNTLYLQMNSLRPEDTALYYCAPESYHASWYDSWGQGTLVTVSS

SEQ ID NO: 3476 - protein, 119 aa, synthetic construct
EVQLVESGGGVVQPGGSLRLSCAASGRTHSINAMAWFRQAPGKEREFVALISWGEGITYYAESVKGRFTISRDNAKNTLYLQMNSLRPEDTALYYCAAESYRASWYDSWGQGTLVTVSS

SEQ ID NO: 3477 - protein, 119 aa, synthetic construct
EVQLVESGGGVVQPGGSLRLSCAASGRVHSINAMAWFRQAPGKEREFVALISWGEGITYYAESVKGRFTISRDNAKNTLYLQMNSLRPEDTALYYCAAESYRASWYDSWGQGTLVTVSS

SEQ ID NO: 3478 - protein, 119 aa, synthetic construct
EVQLVESGGGVVQPGGSLRLSCAASGRTHSINAMAWFRQAPGKEREFVALISWGFGITYYAESVKGRFTISRDNAKNTLYLQMNSLRPEDTALYYCAAESYRASWYDSWGQGTLVTVSS

SEQ ID NO: 3479 - protein, 119 aa, synthetic construct
EVQLVESGGGVVQPGGSLRLSCAASGRVHSINAMAWFRQAPGKEREFVALISWGFGITYYAESVKGRFTISRDNAKNTLYLQMNSLRPEDTALYYCAAESYRASWYDSWGQGTLVTVSS

SEQ ID NO: 3480 - protein, 119 aa, synthetic construct
EVQLVESGGGVVQPGGSLRLSCAASGRTHSINAMAWFRQAPGKEREFVALISWGEGITYYAGSVKGRFTISRDNAKNTLYLQMNSLRPEDTALYYCAAESYRASWYDSWGQGTLVTVSS

SEQ ID NO: 3481 - protein, 119 aa, synthetic construct
EVQLVESGGGVVQPGGSLRLSCAASGRVHSINAMAWFRQAPGKEREFVALISWGEGITYYAGSVKGRFTISRDNAKNTLYLQMNSLRPEDTALYYCAAESYRASWYDSWGQGTLVTVSS

SEQ ID NO: 3482 - protein, 119 aa, synthetic construct
EVQLVESGGGVVQPGGSLRLSCAASGRTHSINAMAWFRQAPGKEREFVALISWGFGITYYAGSVKGRFTISRDNAKNTLYLQMNSLRPEDTALYYCAAESYRASWYDSWGQGTLVTVSS

SEQ ID NO: 3483 - protein, 119 aa, synthetic construct
EVQLVESGGGVVQPGGSLRLSCAASGRVHSINAMAWFRQAPGKEREFVALISWGFGITYYAGSVKGRFTISRDNAKNTLYLQMNSLRPEDTALYYCAAESYRASWYDSWGQGTLVTVSS

SEQ ID NO: 3484 - protein, 119 aa, synthetic construct
EVQLVESGGGVVQPGGSLRLSCAASGRTHSINAMAWFRQAPGKEREFVALISWGEGITYYAESVKGRFTISRDNAKNTLYLQMNSLRPEDTALYYCAPESYRASWYDSWGQGTLVTVSS

SEQ ID NO: 3485 - protein, 119 aa, synthetic construct
EVQLVESGGGVVQPGGSLRLSCAASGRVHSINAMAWFRQAPGKEREFVALISWGEGITYYAESVKGRFTISRDNAKNTLYLQMNSLRPEDTALYYCAPESYRASWYDSWGQGTLVTVSS

SEQ ID NO: 3486 - protein, 119 aa, synthetic construct
EVQLVESGGGVVQPGGSLRLSCAASGRTHSINAMAWFRQAPGKEREFVALISWGFGITYYAESVKGRFTISRDNAKNTLYLQMNSLRPEDTALYYCAPESYRASWYDSWGQGTLVTVSS

SEQ ID NO: 3487 - protein, 119 aa, synthetic construct
EVQLVESGGGVVQPGGSLRLSCAASGRVHSINAMAWFRQAPGKEREFVALISWGFGITYYAESVKGRFTISRDNAKNTLYLQMNSLRPEDTALYYCAPESYRASWYDSWGQGTLVTVSS

SEQ ID NO: 3488 - protein, 119 aa, synthetic construct
EVQLVESGGGVVQPGGSLRLSCAASGRTHSINAMAWFRQAPGKEREFVALISWGEGITYYAGSVKGRFTISRDNAKNTLYLQMNSLRPEDTALYYCAPESYRASWYDSWGQGTLVTVSS

SEQ ID NO: 3489 - protein, 119 aa, synthetic construct
EVQLVESGGGVVQPGGSLRLSCAASGRVHSINAMAWFRQAPGKEREFVALISWGEGITYYAGSVKGRFTISRDNAKNTLYLQMNSLRPEDTALYYCAPESYRASWYDSWGQGTLVTVSS

SEQ ID NO: 3490 - protein, 119 aa, synthetic construct
EVQLVESGGGVVQPGGSLRLSCAASGRTHSINAMAWFRQAPGKEREFVALISWGFGITYYAGSVKGRFTISRDNAKNTLYLQMNSLRPEDTALYYCAPESYRASWYDSWGQGTLVTVSS

SEQ ID NO: 3491 - protein, 119 aa, synthetic construct
EVQLVESGGGVVQPGGSLRLSCAASGRVHSINAMAWFRQAPGKEREFVALISWGFGITYYAGSVKGRFTISRDNAKNTLYLQMNSLRPEDTALYYCAPESYRASWYDSWGQGTLVTVSS

SEQ ID NO: 3492 - protein, 119 aa, synthetic construct
EVQLVESGGGVVQPGGSLRLSCAASGRTHSINAMAWFRQAPGKEREFVALISWGEGITYYAESVKGRFTISRDNAKNTLYLQMNSLRPEDTALYYCAAESYGSSWPDSWGQGTLVTVSS

SEQ ID NO: 3493 - protein, 119 aa, synthetic construct
EVQLVESGGGVVQPGGSLRLSCAASGRVHSINAMAWFRQAPGKEREFVALISWGEGITYYAESVKGRFTISRDNAKNTLYLQMNSLRPEDTALYYCAAESYGSSWPDSWGQGTLVTVSS

SEQ ID NO: 3494 - protein, 119 aa, synthetic construct
EVQLVESGGGVVQPGGSLRLSCAASGRTHSINAMAWFRQAPGKEREFVALISWGFGITYYAESVKGRFTISRDNAKNTLYLQMNSLRPEDTALYYCAAESYGSSWPDSWGQGTLVTVSS

SEQ ID NO: 3495 - protein, 119 aa, synthetic construct
EVQLVESGGGVVQPGGSLRLSCAASGRVHSINAMAWFRQAPGKEREFVALISWGFGITYYAESVKGRFTISRDNAKNTLYLQMNSLRPEDTALYYCAAESYGSSWPDSWGQGTLVTVSS

SEQ ID NO: 3496 - protein, 119 aa, synthetic construct
EVQLVESGGGVVQPGGSLRLSCAASGRTHSINAMAWFRQAPGKEREFVALISWGEGITYYAGSVKGRFTISRDNAKNTLYLQMNSLRPEDTALYYCAAESYGSSWPDSWGQGTLVTVSS

SEQ ID NO: 3497 - protein, 119 aa, synthetic construct
EVQLVESGGGVVQPGGSLRLSCAASGRVHSINAMAWFRQAPGKEREFVALISWGEGITYYAGSVKGRFTISRDNAKNTLYLQMNSLRPEDTALYYCAAESYGSSWPDSWGQGTLVTVSS

SEQ ID NO: 3498 - protein, 119 aa, synthetic construct
EVQLVESGGGVVQPGGSLRLSCAASGRTHSINAMAWFRQAPGKEREFVALISWGFGITYYAGSVKGRFTISRDNAKNTLYLQMNSLRPEDTALYYCAAESYGSSWPDSWGQGTLVTVSS

SEQ ID NO: 3499 - protein, 119 aa, synthetic construct
EVQLVESGGGVVQPGGSLRLSCAASGRVHSINAMAWFRQAPGKEREFVALISWGFGITYYAGSVKGRFTISRDNAKNTLYLQMNSLRPEDTALYYCAAESYGSSWPDSWGQGTLVTVSS

SEQ ID NO: 3500 - protein, 119 aa, synthetic construct
EVQLVESGGGVVQPGGSLRLSCAASGRTHSINAMAWFRQAPGKEREFVALISWGEGITYYAESVKGRFTISRDNAKNTLYLQMNSLRPEDTALYYCAPESYGSSWPDSWGQGTLVTVSS

SEQ ID NO: 3501 - protein, 119 aa, synthetic construct
EVQLVESGGGVVQPGGSLRLSCAASGRVHSINAMAWFRQAPGKEREFVALISWGEGITYYAESVKGRFTISRDNAKNTLYLQMNSLRPEDTALYYCAPESYGSSWPDSWGQGTLVTVSS

SEQ ID NO: 3502 - protein, 119 aa, synthetic construct
EVQLVESGGGVVQPGGSLRLSCAASGRTHSINAMAWFRQAPGKEREFVALISWGFGITYYAESVKGRFTISRDNAKNTLYLQMNSLRPEDTALYYCAPESYGSSWPDSWGQGTLVTVSS

SEQ ID NO: 3503 - protein, 119 aa, synthetic construct
EVQLVESGGGVVQPGGSLRLSCAASGRVHSINAMAWFRQAPGKEREFVALISWGFGITYYAESVKGRFTISRDNAKNTLYLQMNSLRPEDTALYYCAPESYGSSWPDSWGQGTLVTVSS

SEQ ID NO: 3504 - protein, 119 aa, synthetic construct
EVQLVESGGGVVQPGGSLRLSCAASGRTHSINAMAWFRQAPGKEREFVALISWGEGITYYAGSVKGRFTISRDNAKNTLYLQMNSLRPEDTALYYCAPESYGSSWPDSWGQGTLVTVSS

SEQ ID NO: 3505 - protein, 119 aa, synthetic construct
EVQLVESGGGVVQPGGSLRLSCAASGRVHSINAMAWFRQAPGKEREFVALISWGEGITYYAGSVKGRFTISRDNAKNTLYLQMNSLRPEDTALYYCAPESYGSSWPDSWGQGTLVTVSS

SEQ ID NO: 3506 - protein, 119 aa, synthetic construct
EVQLVESGGGVVQPGGSLRLSCAASGRTHSINAMAWFRQAPGKEREFVALISWGFGITYYAGSVKGRFTISRDNAKNTLYLQMNSLRPEDTALYYCAPESYGSSWPDSWGQGTLVTVSS

SEQ ID NO: 3507 - protein, 119 aa, synthetic construct
EVQLVESGGGVVQPGGSLRLSCAASGRVHSINAMAWFRQAPGKEREFVALISWGFGITYYAGSVKGRFTISRDNAKNTLYLQMNSLRPEDTALYYCAPESYGSSWPDSWGQGTLVTVSS

SEQ ID NO: 3508 - protein, 119 aa, synthetic construct
EVQLVESGGGVVQPGGSLRLSCAASGRTHSINAMAWFRQAPGKEREFVALISWGEGITYYAESVKGRFTISRDNAKNTLYLQMNSLRPEDTALYYCAAESYHSSWPDSWGQGTLVTVSS

SEQ ID NO: 3509 - protein, 119 aa, synthetic construct
EVQLVESGGGVVQPGGSLRLSCAASGRVHSINAMAWFRQAPGKEREFVALISWGEGITYYAESVKGRFTISRDNAKNTLYLQMNSLRPEDTALYYCAAESYHSSWPDSWGQGTLVTVSS

SEQ ID NO: 3510 - protein, 119 aa, synthetic construct
EVQLVESGGGVVQPGGSLRLSCAASGRTHSINAMAWFRQAPGKEREFVALISWGFGITYYAESVKGRFTISRDNAKNTLYLQMNSLRPEDTALYYCAAESYHSSWPDSWGQGTLVTVSS

SEQ ID NO: 3511 - protein, 119 aa, synthetic construct
EVQLVESGGGVVQPGGSLRLSCAASGRVHSINAMAWFRQAPGKEREFVALISWGFGITYYAESVKGRFTISRDNAKNTLYLQMNSLRPEDTALYYCAAESYHSSWPDSWGQGTLVTVSS

SEQ ID NO: 3512 - protein, 119 aa, synthetic construct
EVQLVESGGGVVQPGGSLRLSCAASGRTHSINAMAWFRQAPGKEREFVALISWGEGITYYAGSVKGRFTISRDNAKNTLYLQMNSLRPEDTALYYCAAESYHSSWPDSWGQGTLVTVSS

SEQ ID NO: 3513 - protein, 119 aa, synthetic construct
EVQLVESGGGVVQPGGSLRLSCAASGRVHSINAMAWFRQAPGKEREFVALISWGEGITYYAGSVKGRFTISRDNAKNTLYLQMNSLRPEDTALYYCAAESYHSSWPDSWGQGTLVTVSS

SEQ ID NO: 3514 - protein, 119 aa, synthetic construct
EVQLVESGGGVVQPGGSLRLSCAASGRTHSINAMAWFRQAPGKEREFVALISWGFGITYYAGSVKGRFTISRDNAKNTLYLQMNSLRPEDTALYYCAAESYHSSWPDSWGQGTLVTVSS

SEQ ID NO: 3515 - protein, 119 aa, synthetic construct
EVQLVESGGGVVQPGGSLRLSCAASGRVHSINAMAWFRQAPGKEREFVALISWGFGITYYAGSVKGRFTISRDNAKNTLYLQMNSLRPEDTALYYCAAESYHSSWPDSWGQGTLVTVSS

SEQ ID NO: 3516 - protein, 119 aa, synthetic construct
EVQLVESGGGVVQPGGSLRLSCAASGRTHSINAMAWFRQAPGKEREFVALISWGEGITYYAESVKGRFTISRDNAKNTLYLQMNSLRPEDTALYYCAPESYHSSWPDSWGQGTLVTVSS

SEQ ID NO: 3517 - protein, 119 aa, synthetic construct
EVQLVESGGGVVQPGGSLRLSCAASGRVHSINAMAWFRQAPGKEREFVALISWGEGITYYAESVKGRFTISRDNAKNTLYLQMNSLRPEDTALYYCAPESYHSSWPDSWGQGTLVTVSS

SEQ ID NO: 3518 - protein, 119 aa, synthetic construct
EVQLVESGGGVVQPGGSLRLSCAASGRTHSINAMAWFRQAPGKEREFVALISWGFGITYYAESVKGRFTISRDNAKNTLYLQMNSLRPEDTALYYCAPESYHSSWPDSWGQGTLVTVSS

SEQ ID NO: 3519 - protein, 119 aa, synthetic construct
EVQLVESGGGVVQPGGSLRLSCAASGRVHSINAMAWFRQAPGKEREFVALISWGFGITYYAESVKGRFTISRDNAKNTLYLQMNSLRPEDTALYYCAPESYHSSWPDSWGQGTLVTVSS

SEQ ID NO: 3520 - protein, 119 aa, synthetic construct
EVQLVESGGGVVQPGGSLRLSCAASGRTHSINAMAWFRQAPGKEREFVALISWGEGITYYAGSVKGRFTISRDNAKNTLYLQMNSLRPEDTALYYCAPESYHSSWPDSWGQGTLVTVSS

SEQ ID NO: 3521 - protein, 119 aa, synthetic construct
EVQLVESGGGVVQPGGSLRLSCAASGRVHSINAMAWFRQAPGKEREFVALISWGEGITYYAGSVKGRFTISRDNAKNTLYLQMNSLRPEDTALYYCAPESYHSSWPDSWGQGTLVTVSS

SEQ ID NO: 3522 - protein, 119 aa, synthetic construct
EVQLVESGGGVVQPGGSLRLSCAASGRTHSINAMAWFRQAPGKEREFVALISWGFGITYYAGSVKGRFTISRDNAKNTLYLQMNSLRPEDTALYYCAPESYHSSWPDSWGQGTLVTVSS

SEQ ID NO: 3523 - protein, 119 aa, synthetic construct
EVQLVESGGGVVQPGGSLRLSCAASGRVHSINAMAWFRQAPGKEREFVALISWGFGITYYAGSVKGRFTISRDNAKNTLYLQMNSLRPEDTALYYCAPESYHSSWPDSWGQGTLVTVSS

SEQ ID NO: 3524 - protein, 119 aa, synthetic construct
EVQLVESGGGVVQPGGSLRLSCAASGRTHSINAMAWFRQAPGKEREFVALISWGEGITYYAESVKGRFTISRDNAKNTLYLQMNSLRPEDTALYYCAAESYRSSWPDSWGQGTLVTVSS

SEQ ID NO: 3525 - protein, 119 aa, synthetic construct
EVQLVESGGGVVQPGGSLRLSCAASGRVHSINAMAWFRQAPGKEREFVALISWGEGITYYAESVKGRFTISRDNAKNTLYLQMNSLRPEDTALYYCAAESYRSSWPDSWGQGTLVTVSS

SEQ ID NO: 3526 - protein, 119 aa, synthetic construct
EVQLVESGGGVVQPGGSLRLSCAASGRTHSINAMAWFRQAPGKEREFVALISWGFGITYYAESVKGRFTISRDNAKNTLYLQMNSLRPEDTALYYCAAESYRSSWPDSWGQGTLVTVSS

SEQ ID NO: 3527 - protein, 119 aa, synthetic construct
EVQLVESGGGVVQPGGSLRLSCAASGRVHSINAMAWFRQAPGKEREFVALISWGFGITYYAESVKGRFTISRDNAKNTLYLQMNSLRPEDTALYYCAAESYRSSWPDSWGQGTLVTVSS

SEQ ID NO: 3528 - protein, 119 aa, synthetic construct
EVQLVESGGGVVQPGGSLRLSCAASGRTHSINAMAWFRQAPGKEREFVALISWGEGITYYAGSVKGRFTISRDNAKNTLYLQMNSLRPEDTALYYCAAESYRSSWPDSWGQGTLVTVSS

SEQ ID NO: 3529 - protein, 119 aa, synthetic construct
EVQLVESGGGVVQPGGSLRLSCAASGRVHSINAMAWFRQAPGKEREFVALISWGEGITYYAGSVKGRFTISRDNAKNTLYLQMNSLRPEDTALYYCAAESYRSSWPDSWGQGTLVTVSS

SEQ ID NO: 3530 - protein, 119 aa, synthetic construct
EVQLVESGGGVVQPGGSLRLSCAASGRTHSINAMAWFRQAPGKEREFVALISWGFGITYYAGSVKGRFTISRDNAKNTLYLQMNSLRPEDTALYYCAAESYRSSWPDSWGQGTLVTVSS

SEQ ID NO: 3531 - protein, 119 aa, synthetic construct
EVQLVESGGGVVQPGGSLRLSCAASGRVHSINAMAWFRQAPGKEREFVALISWGFGITYYAGSVKGRFTISRDNAKNTLYLQMNSLRPEDTALYYCAAESYRSSWPDSWGQGTLVTVSS

SEQ ID NO: 3532 - protein, 119 aa, synthetic construct
EVQLVESGGGVVQPGGSLRLSCAASGRTHSINAMAWFRQAPGKEREFVALISWGEGITYYAESVKGRFTISRDNAKNTLYLQMNSLRPEDTALYYCAPESYRSSWPDSWGQGTLVTVSS

SEQ ID NO: 3533 - protein, 119 aa, synthetic construct
EVQLVESGGGVVQPGGSLRLSCAASGRVHSINAMAWFRQAPGKEREFVALISWGEGITYYAESVKGRFTISRDNAKNTLYLQMNSLRPEDTALYYCAPESYRSSWPDSWGQGTLVTVSS

SEQ ID NO: 3534 - protein, 119 aa, synthetic construct
EVQLVESGGGVVQPGGSLRLSCAASGRTHSINAMAWFRQAPGKEREFVALISWGFGITYYAESVKGRFTISRDNAKNTLYLQMNSLRPEDTALYYCAPESYRSSWPDSWGQGTLVTVSS

SEQ ID NO: 3535 - protein, 119 aa, synthetic construct
EVQLVESGGGVVQPGGSLRLSCAASGRVHSINAMAWFRQAPGKEREFVALISWGFGITYYAESVKGRFTISRDNAKNTLYLQMNSLRPEDTALYYCAPESYRSSWPDSWGQGTLVTVSS

SEQ ID NO: 3536 - protein, 119 aa, synthetic construct
EVQLVESGGGVVQPGGSLRLSCAASGRTHSINAMAWFRQAPGKEREFVALISWGEGITYYAGSVKGRFTISRDNAKNTLYLQMNSLRPEDTALYYCAPESYRSSWPDSWGQGTLVTVSS

SEQ ID NO: 3537 - protein, 119 aa, synthetic construct
EVQLVESGGGVVQPGGSLRLSCAASGRVHSINAMAWFRQAPGKEREFVALISWGEGITYYAGSVKGRFTISRDNAKNTLYLQMNSLRPEDTALYYCAPESYRSSWPDSWGQGTLVTVSS

SEQ ID NO: 3538 - protein, 119 aa, synthetic construct
EVQLVESGGGVVQPGGSLRLSCAASGRTHSINAMAWFRQAPGKEREFVALISWGFGITYYAGSVKGRFTISRDNAKNTLYLQMNSLRPEDTALYYCAPESYRSSWPDSWGQGTLVTVSS

SEQ ID NO: 3539 - protein, 119 aa, synthetic construct
EVQLVESGGGVVQPGGSLRLSCAASGRVHSINAMAWFRQAPGKEREFVALISWGFGITYYAGSVKGRFTISRDNAKNTLYLQMNSLRPEDTALYYCAPESYRSSWPDSWGQGTLVTVSS

SEQ ID NO: 3540 - protein, 119 aa, synthetic construct
EVQLVESGGGVVQPGGSLRLSCAASGRTHSINAMAWFRQAPGKEREFVALISWGEGITYYAESVKGRFTISRDNAKNTLYLQMNSLRPEDTALYYCAAESYGASWPDSWGQGTLVTVSS

SEQ ID NO: 3541 - protein, 119 aa, synthetic construct
EVQLVESGGGVVQPGGSLRLSCAASGRVHSINAMAWFRQAPGKEREFVALISWGEGITYYAESVKGRFTISRDNAKNTLYLQMNSLRPEDTALYYCAAESYGASWPDSWGQGTLVTVSS

SEQ ID NO: 3542 - protein, 119 aa, synthetic construct
EVQLVESGGGVVQPGGSLRLSCAASGRTHSINAMAWFRQAPGKEREFVALISWGFGITYYAESVKGRFTISRDNAKNTLYLQMNSLRPEDTALYYCAAESYGASWPDSWGQGTLVTVSS

SEQ ID NO: 3543 - protein, 119 aa, synthetic construct
EVQLVESGGGVVQPGGSLRLSCAASGRVHSINAMAWFRQAPGKEREFVALISWGFGITYYAESVKGRFTISRDNAKNTLYLQMNSLRPEDTALYYCAAESYGASWPDSWGQGTLVTVSS

SEQ ID NO: 3544 - protein, 119 aa, synthetic construct
EVQLVESGGGVVQPGGSLRLSCAASGRTHSINAMAWFRQAPGKEREFVALISWGEGITYYAGSVKGRFTISRDNAKNTLYLQMNSLRPEDTALYYCAAESYGASWPDSWGQGTLVTVSS

SEQ ID NO: 3545 - protein, 119 aa, synthetic construct
EVQLVESGGGVVQPGGSLRLSCAASGRVHSINAMAWFRQAPGKEREFVALISWGEGITYYAGSVKGRFTISRDNAKNTLYLQMNSLRPEDTALYYCAAESYGASWPDSWGQGTLVTVSS

SEQ ID NO: 3546 - protein, 119 aa, synthetic construct
EVQLVESGGGVVQPGGSLRLSCAASGRTHSINAMAWFRQAPGKEREFVALISWGFGITYYAGSVKGRFTISRDNAKNTLYLQMNSLRPEDTALYYCAAESYGASWPDSWGQGTLVTVSS

SEQ ID NO: 3547 - protein, 119 aa, synthetic construct
EVQLVESGGGVVQPGGSLRLSCAASGRVHSINAMAWFRQAPGKEREFVALISWGFGITYYAGSVKGRFTISRDNAKNTLYLQMNSLRPEDTALYYCAAESYGASWPDSWGQGTLVTVSS

SEQ ID NO: 3548 - protein, 119 aa, synthetic construct
EVQLVESGGGVVQPGGSLRLSCAASGRTHSINAMAWFRQAPGKEREFVALISWGEGITYYAESVKGRFTISRDNAKNTLYLQMNSLRPEDTALYYCAPESYGASWPDSWGQGTLVTVSS

SEQ ID NO: 3549 - protein, 119 aa, synthetic construct
EVQLVESGGGVVQPGGSLRLSCAASGRVHSINAMAWFRQAPGKEREFVALISWGEGITYYAESVKGRFTISRDNAKNTLYLQMNSLRPEDTALYYCAPESYGASWPDSWGQGTLVTVSS

SEQ ID NO: 3550 - protein, 119 aa, synthetic construct
EVQLVESGGGVVQPGGSLRLSCAASGRTHSINAMAWFRQAPGKEREFVALISWGFGITYYAESVKGRFTISRDNAKNTLYLQMNSLRPEDTALYYCAPESYGASWPDSWGQGTLVTVSS

SEQ ID NO: 3551 - protein, 119 aa, synthetic construct
EVQLVESGGGVVQPGGSLRLSCAASGRTHSINAMAWFRQAPGKEREFVALISWGEGITYYAGSVKGRFTISRDNAKNTLYLQMNSLRPEDTALYYCAPESYGASWPDSWGQGTLVTVSS

SEQ ID NO: 3552 - protein, 119 aa, synthetic construct
EVQLVESGGGVVQPGGSLRLSCAASGRVHSINAMAWFRQAPGKEREFVALISWGEGITYYAGSVKGRFTISRDNAKNTLYLQMNSLRPEDTALYYCAPESYGASWPDSWGQGTLVTVSS

SEQ ID NO: 3553 - protein, 119 aa, synthetic construct
EVQLVESGGGVVQPGGSLRLSCAASGRTHSINAMAWFRQAPGKEREFVALISWGFGITYYAGSVKGRFTISRDNAKNTLYLQMNSLRPEDTALYYCAPESYGASWPDSWGQGTLVTVSS

SEQ ID NO: 3554 - protein, 119 aa, synthetic construct
EVQLVESGGGVVQPGGSLRLSCAASGRVHSINAMAWFRQAPGKEREFVALISWGFGITYYAGSVKGRFTISRDNAKNTLYLQMNSLRPEDTALYYCAPESYGASWPDSWGQGTLVTVSS

SEQ ID NO: 3555 - protein, 119 aa, synthetic construct
EVQLVESGGGVVQPGGSLRLSCAASGRTHSINAMAWFRQAPGKEREFVALISWGEGITYYAESVKGRFTISRDNAKNTLYLQMNSLRPEDTALYYCAAESYHASWPDSWGQGTLVTVSS

SEQ ID NO: 3556 - protein, 119 aa, synthetic construct
EVQLVESGGGVVQPGGSLRLSCAASGRVHSINAMAWFRQAPGKEREFVALISWGEGITYYAESVKGRFTISRDNAKNTLYLQMNSLRPEDTALYYCAAESYHASWPDSWGQGTLVTVSS

SEQ ID NO: 3557 - protein, 119 aa, synthetic construct
EVQLVESGGGVVQPGGSLRLSCAASGRTHSINAMAWFRQAPGKEREFVALISWGFGITYYAESVKGRFTISRDNAKNTLYLQMNSLRPEDTALYYCAAESYHASWPDSWGQGTLVTVSS

SEQ ID NO: 3558 - protein, 119 aa, synthetic construct
EVQLVESGGGVVQPGGSLRLSCAASGRVHSINAMAWFRQAPGKEREFVALISWGFGITYYAESVKGRFTISRDNAKNTLYLQMNSLRPEDTALYYCAAESYHASWPDSWGQGTLVTVSS

SEQ ID NO: 3559 - protein, 119 aa, synthetic construct
EVQLVESGGGVVQPGGSLRLSCAASGRVHSINAMAWFRQAPGKEREFVALISWGEGITYYAESVKGRFTISRDNAKNTLYLQMNSLRPEDTALYYCAPESYHASWPDSWGQGTLVTVSS

SEQ ID NO: 3560 - protein, 119 aa, synthetic construct
EVQLVESGGGVVQPGGSLRLSCAASGRTHSINAMAWFRQAPGKEREFVALISWGFGITYYAESVKGRFTISRDNAKNTLYLQMNSLRPEDTALYYCAPESYHASWPDSWGQGTLVTVSS

SEQ ID NO: 3561 - protein, 119 aa, synthetic construct
EVQLVESGGGVVQPGGSLRLSCAASGRVHSINAMAWFRQAPGKEREFVALISWGFGITYYAESVKGRFTISRDNAKNTLYLQMNSLRPEDTALYYCAPESYHASWPDSWGQGTLVTVSS

SEQ ID NO: 3562 - protein, 119 aa, synthetic construct
EVQLVESGGGVVQPGGSLRLSCAASGRTHSINAMAWFRQAPGKEREFVALISWGEGITYYAGSVKGRFTISRDNAKNTLYLQMNSLRPEDTALYYCAPESYHASWPDSWGQGTLVTVSS

SEQ ID NO: 3563 - protein, 119 aa, synthetic construct
EVQLVESGGGVVQPGGSLRLSCAASGRVHSINAMAWFRQAPGKEREFVALISWGEGITYYAGSVKGRFTISRDNAKNTLYLQMNSLRPEDTALYYCAPESYHASWPDSWGQGTLVTVSS

SEQ ID NO: 3564 - protein, 119 aa, synthetic construct
EVQLVESGGGVVQPGGSLRLSCAASGRTHSINAMAWFRQAPGKEREFVALISWGFGITYYAGSVKGRFTISRDNAKNTLYLQMNSLRPEDTALYYCAPESYHASWPDSWGQGTLVTVSS

SEQ ID NO: 3565 - protein, 119 aa, synthetic construct
EVQLVESGGGVVQPGGSLRLSCAASGRVHSINAMAWFRQAPGKEREFVALISWGFGITYYAGSVKGRFTISRDNAKNTLYLQMNSLRPEDTALYYCAPESYHASWPDSWGQGTLVTVSS

SEQ ID NO: 3566 - protein, 119 aa, synthetic construct
EVQLVESGGGVVQPGGSLRLSCAASGRTHSINAMAWFRQAPGKEREFVALISWGEGITYYAESVKGRFTISRDNAKNTLYLQMNSLRPEDTALYYCAAESYRASWPDSWGQGTLVTVSS

SEQ ID NO: 3567 - protein, 119 aa, synthetic construct
EVQLVESGGGVVQPGGSLRLSCAASGRVHSINAMAWFRQAPGKEREFVALISWGEGITYYAESVKGRFTISRDNAKNTLYLQMNSLRPEDTALYYCAAESYRASWPDSWGQGTLVTVSS

SEQ ID NO: 3568 - protein, 119 aa, synthetic construct
EVQLVESGGGVVQPGGSLRLSCAASGRTHSINAMAWFRQAPGKEREFVALISWGFGITYYAESVKGRFTISRDNAKNTLYLQMNSLRPEDTALYYCAAESYRASWPDSWGQGTLVTVSS

SEQ ID NO: 3569 - protein, 119 aa, synthetic construct
EVQLVESGGGVVQPGGSLRLSCAASGRVHSINAMAWFRQAPGKEREFVALISWGFGITYYAESVKGRFTISRDNAKNTLYLQMNSLRPEDTALYYCAAESYRASWPDSWGQGTLVTVSS

SEQ ID NO: 3570 - protein, 119 aa, synthetic construct
EVQLVESGGGVVQPGGSLRLSCAASGRTHSINAMAWFRQAPGKEREFVALISWGEGITYYAGSVKGRFTISRDNAKNTLYLQMNSLRPEDTALYYCAAESYRASWPDSWGQGTLVTVSS

SEQ ID NO: 3571 - protein, 119 aa, synthetic construct
EVQLVESGGGVVQPGGSLRLSCAASGRVHSINAMAWFRQAPGKEREFVALISWGEGITYYAGSVKGRFTISRDNAKNTLYLQMNSLRPEDTALYYCAAESYRASWPDSWGQGTLVTVSS

SEQ ID NO: 3572 - protein, 119 aa, synthetic construct
EVQLVESGGGVVQPGGSLRLSCAASGRTHSINAMAWFRQAPGKEREFVALISWGFGITYYAGSVKGRFTISRDNAKNTLYLQMNSLRPEDTALYYCAAESYRASWPDSWGQGTLVTVSS

SEQ ID NO: 3573 - protein, 119 aa, synthetic construct
EVQLVESGGGVVQPGGSLRLSCAASGRVHSINAMAWFRQAPGKEREFVALISWGFGITYYAGSVKGRFTISRDNAKNTLYLQMNSLRPEDTALYYCAAESYRASWPDSWGQGTLVTVSS

SEQ ID NO: 3574 - protein, 119 aa, synthetic construct
EVQLVESGGGVVQPGGSLRLSCAASGRTHSINAMAWFRQAPGKEREFVALISWGEGITYYAESVKGRFTISRDNAKNTLYLQMNSLRPEDTALYYCAPESYRASWPDSWGQGTLVTVSS

SEQ ID NO: 3575 - protein, 119 aa, synthetic construct
EVQLVESGGGVVQPGGSLRLSCAASGRVHSINAMAWFRQAPGKEREFVALISWGEGITYYAESVKGRFTISRDNAKNTLYLQMNSLRPEDTALYYCAPESYRASWPDSWGQGTLVTVSS

SEQ ID NO: 3576 - protein, 119 aa, synthetic construct
EVQLVESGGGVVQPGGSLRLSCAASGRVHSINAMAWFRQAPGKEREFVALISWGFGITYYAESVKGRFTISRDNAKNTLYLQMNSLRPEDTALYYCAPESYRASWPDSWGQGTLVTVSS

SEQ ID NO: 3577 - protein, 119 aa, synthetic construct
EVQLVESGGGVVQPGGSLRLSCAASGRTHSINAMAWFRQAPGKEREFVALISWGEGITYYAGSVKGRFTISRDNAKNTLYLQMNSLRPEDTALYYCAPESYRASWPDSWGQGTLVTVSS

SEQ ID NO: 3578 - protein, 119 aa, synthetic construct
EVQLVESGGGVVQPGGSLRLSCAASGRVHSINAMAWFRQAPGKEREFVALISWGEGITYYAGSVKGRFTISRDNAKNTLYLQMNSLRPEDTALYYCAPESYRASWPDSWGQGTLVTVSS

SEQ ID NO: 3579 - protein, 119 aa, synthetic construct
EVQLVESGGGVVQPGGSLRLSCAASGRTHSINAMAWFRQAPGKEREFVALISWGFGITYYAGSVKGRFTISRDNAKNTLYLQMNSLRPEDTALYYCAPESYRASWPDSWGQGTLVTVSS

SEQ ID NO: 3580 - protein, 119 aa, synthetic construct
EVQLVESGGGVVQPGGSLRLSCAASGRVHSINAMAWFRQAPGKEREFVALISWGFGITYYAGSVKGRFTISRDNAKNTLYLQMNSLRPEDTALYYCAPESYRASWPDSWGQGTLVTVSS

SEQ ID NO: 3581 - protein, 119 aa, synthetic construct
EVQLVESGGGVVQPGGSLRLSCAASGRTHSINAMAWFRQAPGKEREFVALISWGEGITYYAGSVKGRFTISRDNAKNTLYLQMNSLRPEDTALYYCAAESYHASWPDSWGQGTLVTVSS

SEQ ID NO: 3582 - protein, 119 aa, synthetic construct
EVQLVESGGGVVQPGGSLRLSCAASGRVHSINAMAWFRQAPGKEREFVALISWGEGITYYAGSVKGRFTISRDNAKNTLYLQMNSLRPEDTALYYCAAESYHASWPDSWGQGTLVTVSS

SEQ ID NO: 3583 - protein, 119 aa, synthetic construct
EVQLVESGGGVVQPGGSLRLSCAASGRTHSINAMAWFRQAPGKEREFVALISWGFGITYYAGSVKGRFTISRDNAKNTLYLQMNSLRPEDTALYYCAAESYHASWPDSWGQGTLVTVSS

SEQ ID NO: 3584 - protein, 119 aa, synthetic construct
EVQLVESGGGVVQPGGSLRLSCAASGRVHSINAMAWFRQAPGKEREFVALISWGFGITYYAGSVKGRFTISRDNAKNTLYLQMNSLRPEDTALYYCAAESYHASWPDSWGQGTLVTVSS

SEQ ID NO: 3585 - protein, 119 aa, synthetic construct
EVQLVESGGGVVQPGGSLRLSCAASGRTHSINAMAWFRQAPGKEREFVALISWGEGITYYAESVKGRFTISRDNAKNTLYLQMNSLRPEDTALYYCAPESYHASWPDSWGQGTLVTVSS

SEQ ID NO: 3586 - protein, 119 aa, synthetic construct
EVQLVESGGGVVQPGGSLRLSCAASGRTHSINAMAWFRQAPGKEREFVALISWGFGITYYAESVKGRFTISRDNAKNTLDLQMNSLRPEDTALYYCAPESYGSSWYDSWGQGTLVTVSS

SEQ ID NO: 3587 - protein, 119 aa, synthetic construct
EVQLVESGGGVVQPGGSLRLSCAASGRTHSINAMAWFRQAPGKEREFVALISWGFGITYYAESVKGRFTISRDNAKNTLSLQMNSLRPEDTALYYCAPESYGSSWYDSWGQGTLVTVSS

SEQ ID NO: 3588 - protein, 119 aa, synthetic construct
EVQLVESGGGVVQPGGSLRLSCAASGRTHSINAMAWFRQAPGKEREFVALISWGFGITYYAESVKGRFTISRDNAKNTLDLQMNSLRPEDTALYYCAGESYGSSWYDSWGQGTLVTVSS

SEQ ID NO: 3589 - protein, 119 aa, synthetic construct
EVQLVESGGGVVQPGGSLRLSCAASGRTHSINAMAWFRQAPGKEREFVALISWGFGITYYAESVKGRFTISRDNAKNTLSLQMNSLRPEDTALYYCAGESYGSSWYDSWGQGTLVTVSS

SEQ ID NO: 3590 - protein, 119 aa, synthetic construct
EVQLVESGGGVVQPGGSLRLSCAASGRTHSINAMAWFRQAPGKEREFVALISWGFGITHYAESVKGRFTISRDNAKNTLDLQMNSLRPEDTALYYCAPESYGSSWYDSWGQGTLVTVSS

SEQ ID NO: 3591 - protein, 119 aa, synthetic construct
EVQLVESGGGVVQPGGSLRLSCAASGRTHSINAMAWFRQAPGKEREFVALISWGFGITHYAESVKGRFTISRDNAKNTLSLQMNSLRPEDTALYYCAPESYGSSWYDSWGQGTLVTVSS

SEQ ID NO: 3592 - protein, 119 aa, synthetic construct
EVQLVESGGGVVQPGGSLRLSCAASGRTHSINAMAWFRQAPGKEREFVALISWGFGITHYAESVKGRFTISRDNAKNTLDLQMNSLRPEDTALYYCAGESYGSSWYDSWGQGTLVTVSS

SEQ ID NO: 3593 - protein, 119 aa, synthetic construct
EVQLVESGGGVVQPGGSLRLSCAASGRTHSINAMAWFRQAPGKEREFVALISWGFGITHYAESVKGRFTISRDNAKNTLSLQMNSLRPEDTALYYCAGESYGSSWYDSWGQGTLVTVSS

SEQ ID NO: 3594 - protein, 119 aa, synthetic construct
DVQLVESGGGVVQPGGSLRLSCAASGRTHSINAMAWFRQAPGKEREFVALISWGFGITYYAESVKGRFTISRDNAKNTLSLQMNSLRPEDTALYYCAGESYGSSWYDSWGQGTLVTVSS

SEQ ID NO: 3595 - protein, 119 aa, synthetic construct
DVQLVESGGGVVQPGGSLRLSCAASGRTHSINAMAWFRQAPGKEREFVALISWGFGITYYAESVKGRFTISRDNAKNTLDLQMNSLRPEDTALYYCAGESYGSSWYDSWGQGTLVTVSS

SEQ ID NO: 3596 - protein, 119 aa, synthetic construct
EVQLVESGGGVVQPGGSLRLSCAASGRTHSINAMAWFRQAPGKEREFVALIHWGFGITYYAESVKGRFTISRDNAKNTLSLQMNSLRPEDTALYYCAGESYGSSWYDSWGQGTLVTVSS

SEQ ID NO: 3597 - protein, 119 aa, synthetic construct
EVQLVESGGGVVQPGGSLRLSCAASGRTHSINAMAWFRQAPGKEREFVALIVWGFGITYYAESVKGRFTISRDNAKNTLYLQMNSLRPEDTALYYCAGESYGSSWYDSWGQGTLVTVSS

SEQ ID NO: 3598 - protein, 119 aa, synthetic construct
EVQLVESGGGVVQPGGSLRLSCAASGRVHSINAMAWFRQAPGKEREFVALIVWGFGITYYAESVKGRFTISRDNAKNTLDLQMNSLRPEDTALYYCAAESYGASWYDSWGQGTLVTVSS

SEQ ID NO: 3599 - protein, 119 aa, synthetic construct
EVQLVESGGGVVQPGGSLRLSCAASGRVHSINAMAWFRQAPGKEREFVAGISWGFGITYYAESVKGRFTISRDNAKNTLYLQMNSLRPEDTALYYCAGESYGASWYDSWGQGTLVTVSS

SEQ ID NO: 3600 - protein, 119 aa, synthetic construct
EVQLVESGGGVVQPGGSLRLSCAASGRVHSINAMAWFRQAPGKEREFVALISWGFGITYYAESVKGRFTISRDNAKNTLSLQMNSLRPEDTALYYCAGESYGASWYDSWGQGTLVTVSS

SEQ ID NO: 3601 - protein, 119 aa, synthetic construct
EVQLVESGGGVVQPGGSLRLSCAASGRTHSINAMAWFRQAPGKEREFVALIHWGFGITYYAESVKGRFTISRDNAKNTLYLQMNSLRPEDTALYYCAGESYGSSWYDSWGQGTLVTVSS

SEQ ID NO: 3602 - protein, 119 aa, synthetic construct
EVQLVESGGGVVQPGGSLRLSCAASGRVHSINAMAWFRQAPGKEREFVALIHWGFGITYYAESVKGRFTISRDNAKNTLDLQMNSLRPEDTALYYCAAESYGASWYDSWGQGTLVTVSS

SEQ ID NO: 3603 - protein, 119 aa, synthetic construct
EVQLVESGGGVVQPGGSLRLSCAASGRVHSINAMAWFRQAPGKEREFVALIVWGFGITYYAESVKGRFTISRDNAKNTLYLQMNSLRPEDTALYYCAGESYGASWYDSWGQGTLVTVSS

SEQ ID NO: 3604 - protein, 119 aa, synthetic construct
EVQLVESGGGVVQPGGSLRLSCAASGRVHSINAMAWFRQAPGKEREFVARISWGFGITYYAESVKGRFTISRDNAKNTLSLQMNSLRPEDTALYYCAGESYGASWYDSWGQGTLVTVSS

SEQ ID NO: 3605 - protein, 119 aa, synthetic construct
EVQLVESGGGVVQPGGSLRLSCAASGRVHSINAMAWFRQAPGKEREFVARISWGFGITYYAESVKGRFTISRDNAKNTLYLQMNSLRPEDTALYYCAAESYGASWYDSWGQGTLVTVSS

SEQ ID NO: 3606 - protein, 119 aa, synthetic construct
EVQLVESGGGVVQPGGSLRLSCAASGRVHSINAMAWFRQAPGKEREFVARISWGFGITYYAESVKGRFTISRDNAKNTLSLQMNSLRPEDTALYYCAAESYGASWYDSWGQGTLVTVSS

SEQ ID NO: 3607 - protein, 119 aa, synthetic construct
EVQLVESGGGVVQPGGSLRLSCAASGRVHSINAMAWFRQAPGKEREFVALIHWGFGITYYAESVKGRFTISRDNAKNTLYLQMNSLRPEDTALYYCAGESYGASWYDSWGQGTLVTVSS

SEQ ID NO: 3608 - protein, 119 aa, synthetic construct
EVQLVESGGGVVQPGGSLRLSCAASGRVHSINAMAWFRQAPGKEREFVAGISWGFGITYYAESVKGRFTISRDNAKNTLSLQMNSLRPEDTALYYCAGESYGASWYDSWGQGTLVTVSS

SEQ ID NO: 3609 - protein, 119 aa, synthetic construct
EVQLVESGGGVVQPGGSLRLSCAASGRTHSINAMAWFRQAPGKEREFVAGISWGFGITYYAESVKGRFTISRDNAKNTLDLQMNSLRPEDTALYYCAGESYGSSWYDSWGQGTLVTVSS

SEQ ID NO: 3610 - protein, 119 aa, synthetic construct
EVQLVESGGGVVQPGGSLRLSCAASGRVHSINAMAWFRQAPGKEREFVAGISWGFGITYYAESVKGRFTISRDNAKNTLYLQMNSLRPEDTALYYCAAESYGASWYDSWGQGTLVTVSS

SEQ ID NO: 3611 - protein, 119 aa, synthetic construct
EVQLVESGGGVVQPGGSLRLSCAASGRVHSINAMAWFRQAPGKEREFVAGISWGFGITYYAESVKGRFTISRDNAKNTLSLQMNSLRPEDTALYYCAAESYGASWYDSWGQGTLVTVSS

SEQ ID NO: 3612 - protein, 119 aa, synthetic construct
EVQLVESGGGVVQPGGSLRLSCAASGRVHSINAMAWFRQAPGKEREFVALISWGFGITYYAESVKGRFTISRDNAKNTLDLQMNSLRPEDTALYYCAGESYGASWYDSWGQGTLVTVSS

SEQ ID NO: 3613 - protein, 119 aa, synthetic construct
EVQLVESGGGVVQPGGSLRLSCAASGRVHSINAMAWFRQAPGKEREFVALIVWGFGITYYAESVKGRFTISRDNAKNTLSLQMNSLRPEDTALYYCAGESYGASWYDSWGQGTLVTVSS

SEQ ID NO: 3614 - protein, 119 aa, synthetic construct
EVQLVESGGGVVQPGGSLRLSCAASGRTHSINAMAWFRQAPGKEREFVALIVWGFGITYYAESVKGRFTISRDNAKNTLDLQMNSLRPEDTALYYCAGESYGSSWYDSWGQGTLVTVSS

SEQ ID NO: 3615 - protein, 119 aa, synthetic construct
EVQLVESGGGVVQPGGSLRLSCAASGRVHSINAMAWFRQAPGKEREFVALIVWGFGITYYAESVKGRFTISRDNAKNTLYLQMNSLRPEDTALYYCAAESYGASWYDSWGQGTLVTVSS

SEQ ID NO: 3616 - protein, 119 aa, synthetic construct
EVQLVESGGGVVQPGGSLRLSCAASGRVHSINAMAWFRQAPGKEREFVALIVWGFGITYYAESVKGRFTISRDNAKNTLSLQMNSLRPEDTALYYCAAESYGASWYDSWGQGTLVTVSS

SEQ ID NO: 3617 - protein, 119 aa, synthetic construct
EVQLVESGGGVVQPGGSLRLSCAASGRTHSINAMAWFRQAPGKEREFVALIHWGFGITYYAESVKGRFTISRDNAKNTLDLQMNSLRPEDTALYYCAGESYGSSWYDSWGQGTLVTVSS

SEQ ID NO: 3618 - protein, 119 aa, synthetic construct
EVQLVESGGGVVQPGGSLRLSCAASGRVHSINAMAWFRQAPGKEREFVALIHWGFGITYYAESVKGRFTISRDNAKNTLYLQMNSLRPEDTALYYCAAESYGASWYDSWGQGTLVTVSS

SEQ ID NO: 3619 - protein, 119 aa, synthetic construct
EVQLVESGGGVVQPGGSLRLSCAASGRVHSINAMAWFRQAPGKEREFVALIHWGFGITYYAESVKGRFTISRDNAKNTLSLQMNSLRPEDTALYYCAAESYGASWYDSWGQGTLVTVSS

SEQ ID NO: 3620 - protein, 119 aa, synthetic construct
EVQLVESGGGVVQPGGSLRLSCAASGRVHSINAMAWFRQAPGKEREFVAGISWGFGITYYAESVKGRFTISRDNAKNTLDLQMNSLRPEDTALYYCAGESYGASWYDSWGQGTLVTVSS

SEQ ID NO: 3621 - protein, 119 aa, synthetic construct
EVQLVESGGGVVQPGGSLRLSCAASGRVHSINAMAWFRQAPGKEREFVALISWGFGITYYAESVKGRFTISRDNAKNTLDLQMNSLRPEDTALYYCAAESYGASWYDSWGQGTLVTVSS

SEQ ID NO: 3622 - protein, 119 aa, synthetic construct
EVQLVESGGGVVQPGGSLRLSCAASGRTHSINAMAWFRQAPGKEREFVARISWGFGITYYAESVKGRFTISRDNAKNTLYLQMNSLRPEDTALYYCAGESYGSSWYDSWGQGTLVTVSS

SEQ ID NO: 3623 - protein, 119 aa, synthetic construct
EVQLVESGGGVVQPGGSLRLSCAASGRVHSINAMAWFRQAPGKEREFVARISWGFGITYYAESVKGRFTISRDNAKNTLDLQMNSLRPEDTALYYCAAESYGASWYDSWGQGTLVTVSS

SEQ ID NO: 3624 - protein, 119 aa, synthetic construct
EVQLVESGGGVVQPGGSLRLSCAASGRVHSINAMAWFRQAPGKEREFVALISWGFGITYYAESVKGRFTISRDNAKNTLYLQMNSLRPEDTALYYCAGESYGASWYDSWGQGTLVTVSS

SEQ ID NO: 3625 - protein, 119 aa, synthetic construct
EVQLVESGGGVVQPGGSLRLSCAASGRVHSINAMAWFRQAPGKEREFVALIVWGFGITYYAESVKGRFTISRDNAKNTLDLQMNSLRPEDTALYYCAGESYGASWYDSWGQGTLVTVSS

SEQ ID NO: 3626 - protein, 119 aa, synthetic construct
EVQLVESGGGVVQPGGSLRLSCAASGRVHSINAMAWFRQAPGKEREFVALISWGFGITYYAESVKGRFTISRDNAKNTLSLQMNSLRPEDTALYYCAAESYGASWYDSWGQGTLVTVSS

SEQ ID NO: 3627 - protein, 119 aa, synthetic construct
EVQLVESGGGVVQPGGSLRLSCAASGRTHSINAMAWFRQAPGKEREFVALIVWGFGITYYAESVKGRFTISRDNAKNTLSLQMNSLRPEDTALYYCAGESYGSSWYDSWGQGTLVTVSS

SEQ ID NO: 3628 - protein, 119 aa, synthetic construct
EVQLVESGGGVVQPGGSLRLSCAASGRTHSINAMAWFRQAPGKEREFVAGISWGFGITYYAESVKGRFTISRDNAKNTLYLQMNSLRPEDTALYYCAGESYGSSWYDSWGQGTLVTVSS

SEQ ID NO: 3629 - protein, 119 aa, synthetic construct
EVQLVESGGGVVQPGGSLRLSCAASGRVHSINAMAWFRQAPGKEREFVAGISWGFGITYYAESVKGRFTISRDNAKNTLDLQMNSLRPEDTALYYCAAESYGASWYDSWGQGTLVTVSS

SEQ ID NO: 3630 - protein, 119 aa, synthetic construct
EVQLVESGGGVVQPGGSLRLSCAASGRVHSINAMAWFRQAPGKEREFVARISWGFGITYYAESVKGRFTISRDNAKNTLYLQMNSLRPEDTALYYCAGESYGASWYDSWGQGTLVTVSS

SEQ ID NO: 3631 - protein, 119 aa, synthetic construct
EVQLVESGGGVVQPGGSLRLSCAASGRVHSINAMAWFRQAPGKEREFVALIHWGFGITYYAESVKGRFTISRDNAKNTLDLQMNSLRPEDTALYYCAGESYGASWYDSWGQGTLVTVSS

SEQ ID NO: 3632 - protein, 119 aa, synthetic construct
EVQLVESGGGVVQPGGSLRLSCAASGRVHSINAMAWFRQAPGKEREFVALIHWGFGITYYAESVKGRFTISRDNAKNTLSLQMNSLRPEDTALYYCAGESYGASWYDSWGQGTLVTVSS

SEQ ID NO: 3633 - protein, 119 aa, synthetic construct
EVQLVESGGGVVQPGGSLRLSCAASGRTHSINAMAWFRQAPGKEREFVARISWGFGITYYAESVKGRFTISRDNAKNTLDLQMNSLRPEDTALYYCAGESYGSSWYDSWGQGTLVTVSS

SEQ ID NO: 3634 - protein, 119 aa, synthetic construct
EVQLVESGGGVVQPGGSLRLSCAASGRVHSINAMAWFRQAPGKEREFVARISWGFGITYYAESVKGRFTISRDNAKNTLDLQMNSLRPEDTALYYCAGESYGASWYDSWGQGTLVTVSS

SEQ ID NO: 3635 - protein, 119 aa, synthetic construct
EVQLVESGGGVVQPGGSLRLSCAASGRTHSINAMAWFRQAPGKEREFVARISWGFGITYYAESVKGRFTISRDNAKNTLSLQMNSLRPEDTALYYCAGESYGSSWYDSWGQGTLVTVSS

SEQ ID NO: 3636 - protein, 119 aa, synthetic construct
EVQLVESGGGVVQPGGSLRLSCAASGRTHSINAMAWFRQAPGKEREFVAGISWGFGITYYAESVKGRFTISRDNAKNTLSLQMNSLRPEDTALYYCAGESYGSSWYDSWGQGTLVTVSS

SEQ ID NO: 3637 - protein, 119 aa, synthetic construct
DVQLVESGGGVVQPGGSLRLSCAASGRVHSINAMAWFRQAPGKEREFVALISWGFGITYYAESVKGRFTISRDNAKNTLYLQMNSLRPEDTALYYCAAESYGASWYDSWGQGTLVTVSS

SEQ ID NO: 3638 - protein, 119 aa, synthetic construct
EVQLVESGGGVVQPGGSLRLSCAASGRVHSINAMAWFRQAPGKEREFVALISWGFGITYYAESVKGRFTISRDNAKNTMYLQMNSLRPEDTALYYCAAESYGASWYDSWGQGTLVTVSS

SEQ ID NO: 3639 - protein, 119 aa, synthetic construct
EVQLVESGGGVVQPGGSLRLSCAASGRVHSINAMAWFRQAPGKEREFVALISWGFGITYYAESVKGRFTISRDNAKNTVYLQMNSLRPEDTALYYCAAESYGASWYDSWGQGTLVTVSS

SEQ ID NO: 3640 - protein, 119 aa, synthetic construct
DVQLVESGGGVVQPGGSLRLSCAASGRTHSINAMAWFRQAPGKEREFVALISWGFGITYYAESVKGRFTISRDNAKNTLYLQMNSLRPEDTALYYCAAESYGASWYDSWGQGTLVTVSS

SEQ ID NO: 3641 - protein, 119 aa, synthetic construct
DVQLVESGGGVVQPGGSLRLSCAASGRTHSINAMAWFRQAPGKEREFVALISWGFGITYYAESVKGRFTISRDNAKNTLYLQMNSLRPEDTALYYCAAESYGSSWYDSWGQGTLVTVSS

SEQ ID NO: 3642 - protein, 119 aa, synthetic construct
DVQLVESGGGLVQTGGSLRLSCAASGRMHSINAMAWFRQVPGKEREFVALISWGNGITYYEDSMKGRFTISRDNAKNTMYLQMNSLKPEDTARYFCAAESYGSSWYDSWGQGTLVTVSS

SEQ ID NO: 3643 - protein, 119 aa, synthetic construct
EVQLVESGGGVVQPGGSLRLSCAASGRVHSINAMAWFRQAPGKEREFVALISWGFGITYYAESVKGRFTISRDKAKNTMYLQMNSLRPEDTALYYCAAESYGASWYDSWGQGTLVTVSS

SEQ ID NO: 3644 - protein, 119 aa, synthetic construct
EVQLVESGGGVVQPGGSLRLSCAASGRVHSINAMAWFRQAPGKEREFVALISWGTGITYYAESVKGRFTISRDKAKNTMYLQMNSLRPEDTALYYCAAESYGASWYDSWGQGTLVTVSS

SEQ ID NO: 3645 - protein, 119 aa, synthetic construct
EVQLVESGGGVVQPGGSLRLSCAASGRVHSINAMAWFRQAPGKEREFVALISWGSGITYYAESVKGRFTISRDKAKNTMYLQMNSLRPEDTALYYCAAESYGASWYDSWGQGTLVTVSS

SEQ ID NO: 3646 - protein, 119 aa, synthetic construct
EVQLVESGGGVVQPGGSLRLSCAASGRVHSINAMAWFRQAPGKEREFVALISWGSGITYYAESVKGRFTISRDNAKNTMYLQMNSLRPEDTALYYCAAESYGASWYDSWGQGTLVTVSS

SEQ ID NO: 3647 - protein, 119 aa, synthetic construct
EVQLVESGGGVVQPGGSLRLSCAASGRVHSINAMAWFRQAPGKEREFVALISWGTGITYYAESVKGRFTISRDNAKNTMYLQMNSLRPEDTALYYCAAESYGASWYDSWGQGTLVTVSS

SEQ ID NO: 3648 - protein, 119 aa, synthetic construct
EVQLVESGGGVVQPGGSLRLSCAASGRTHSINAMAWFRQAPGKEREFVALISWGFGITYYAESVKGRFTISRDKAKNTLYLQMNSLRPEDTALYYCAAESYGASWYDSWGQGTLVTVSS

SEQ ID NO: 3649 - protein, 119 aa, synthetic construct
EVQLVESGGGVVQPGGSLRLSCAASGRTHSINAMAWFRQAPGKEREFVALISWGTGITYYAESVKGRFTISRDKAKNTLYLQMNSLRPEDTALYYCAAESYGASWYDSWGQGTLVTVSS

SEQ ID NO: 3650 - protein, 119 aa, synthetic construct
EVQLVESGGGVVQPGGSLRLSCAASGRTHSINAMAWFRQAPGKEREFVALISWGSGITYYAESVKGRFTISRDKAKNTLYLQMNSLRPEDTALYYCAAESYGASWYDSWGQGTLVTVSS

SEQ ID NO: 3651 - protein, 119 aa, synthetic construct
EVQLVESGGGVVQPGGSLRLSCAASGRTHSINAMAWFRQAPGKEREFVALISWGSGITYYAESVKGRFTISRDNAKNTLYLQMNSLRPEDTALYYCAAESYGASWYDSWGQGTLVTVSS

SEQ ID NO: 3652 - protein, 119 aa, synthetic construct
EVQLVESGGGVVQPGGSLRLSCAASGRTHSINAMAWFRQAPGKEREFVALISWGTGITYYAESVKGRFTISRDNAKNTLYLQMNSLRPEDTALYYCAAESYGASWYDSWGQGTLVTVSS

SEQ ID NO: 3653 - protein, 119 aa, synthetic construct
EVQLVESGGGVVQPGGSLRLSCAASGRTHSINAMAWFRQAPGKEREFVALISWGFGITYYAESVKGRFTISRDKAKNTLYLQMNSLRPEDTALYYCAAESYGSSWYDSWGQGTLVTVSS

SEQ ID NO: 3654 - protein, 119 aa, synthetic construct
EVQLVESGGGVVQPGGSLRLSCAASGRTHSINAMAWFRQAPGKEREFVALISWGTGITYYAESVKGRFTISRDKAKNTLYLQMNSLRPEDTALYYCAAESYGSSWYDSWGQGTLVTVSS

SEQ ID NO: 3655 - protein, 119 aa, synthetic construct
EVQLVESGGGVVQPGGSLRLSCAASGRTHSINAMAWFRQAPGKEREFVALISWGSGITYYAESVKGRFTISRDKAKNTLYLQMNSLRPEDTALYYCAAESYGSSWYDSWGQGTLVTVSS

SEQ ID NO: 3656 - protein, 119 aa, synthetic construct
EVQLVESGGGVVQPGGSLRLSCAASGRTHSINAMAWFRQAPGKEREFVALISWGSGITYYAESVKGRFTISRDNAKNTLYLQMNSLRPEDTALYYCAAESYGSSWYDSWGQGTLVTVSS

SEQ ID NO: 3657 - protein, 119 aa, synthetic construct
EVQLVESGGGVVQPGGSLRLSCAASGRTHSINAMAWFRQAPGKEREFVALISWGTGITYYAESVKGRFTISRDNAKNTLYLQMNSLRPEDTALYYCAAESYGSSWYDSWGQGTLVTVSS

SEQ ID NO: 3658 - protein, 119 aa, synthetic construct
EVQLVESGGGVVQPGGSLRLSCAASGRVHSINAMAWFRQAPGKEREFVALISWGFGITYYAESVKGRFTISRDKAKNTLYLQMNSLRPEDTALYYCAAESYGASWYDSWGQGTLVTVSS

SEQ ID NO: 3659 - protein, 119 aa, synthetic construct
EVQLVESGGGVVQPGGSLRLSCAASGRVHSINAMAWFRQAPGKEREFVALISWGTGITYYAESVKGRFTISRDKAKNTLYLQMNSLRPEDTALYYCAAESYGASWYDSWGQGTLVTVSS

SEQ ID NO: 3660 - protein, 119 aa, synthetic construct
EVQLVESGGGVVQPGGSLRLSCAASGRVHSINAMAWFRQAPGKEREFVALISWGSGITYYAESVKGRFTISRDKAKNTLYLQMNSLRPEDTALYYCAAESYGASWYDSWGQGTLVTVSS

SEQ ID NO: 3661 - protein, 119 aa, synthetic construct
EVQLVESGGGVVQPGGSLRLSCAASGRVHSINAMAWFRQAPGKEREFVALISWGSGITYYAESVKGRFTISRDNAKNTLYLQMNSLRPEDTALYYCAAESYGASWYDSWGQGTLVTVSS

SEQ ID NO: 3662 - protein, 119 aa, synthetic construct
EVQLVESGGGVVQPGGSLRLSCAASGRVHSINAMAWFRQAPGKEREFVALISWGTGITYYAESVKGRFTISRDNAKNTLYLQMNSLRPEDTALYYCAAESYGASWYDSWGQGTLVTVSS

SEQ ID NO: 3663 - protein, 14 aa, synthetic construct
WFRQAPGKEREFVA

SEQ ID NO: 3664 - protein, 14 aa, synthetic construct
WFRQVPGKECEFVA

SEQ ID NO: 3665 - protein, 14 aa, synthetic construct
WFRQVPGKEREFAA

SEQ ID NO: 3666 - protein, 14 aa, synthetic construct
WFRQVPGKEREFVA

SEQ ID NO: 3667 - protein, 14 aa, synthetic construct
WFRRVPGKEREFVA

SEQ ID NO: 3668 - protein, 39 aa, synthetic construct
YAASVKGRFTISRDNAKNTMYLQMNSLRPEDTALYYCAA

SEQ ID NO: 3669 - protein, 39 aa, synthetic construct
YADSMKGRFTISRDNAKNTMYLQMNSLRPEDTALYFCAA

SEQ ID NO: 3670 - protein, 39 aa, synthetic construct
YADSMKGRFTISRDNAKNTMYLQMNSLRPEDTALYYCAA

SEQ ID NO: 3671 - protein, 39 aa, synthetic construct
YADSVKGRFTISRDNAKNTLYLQMNSLRPEDTALYYCAA

SEQ ID NO: 3672 - protein, 39 aa, synthetic construct
YADSVKGRFTISRDNAKNTMYLQMNSLRPEDTALYFCAA

SEQ ID NO: 3673 - protein, 39 aa, synthetic construct
YADSVKGRFTISRDNAKNTMYLQMNSLRPEDTALYYCAA

SEQ ID NO: 3674 - protein, 39 aa, synthetic construct; identical to SEQ ID NO: 642

SEQ ID NO: 3675 - protein, 39 aa, synthetic construct
YAESVKGRFTISRDKAKNTLYLQMNSLRPEDTALYYCAA

SEQ ID NO: 3676 - protein, 39 aa, synthetic construct
YAESVKGRFTISRDKAKNTMYLQMNSLRPEDTALYYCAA

SEQ ID NO: 3677 - protein, 39 aa, synthetic construct
YAESVKGRFTISRDNAKNTLDLQMNSLRPEDTALYYCAA

SEQ ID NO: 3678 - protein, 39 aa, synthetic construct
YAESVKGRFTISRDNAKNTLDLQMNSLRPEDTALYYCAG

SEQ ID NO: 3679 - protein, 39 aa, synthetic construct
YAESVKGRFTISRDNAKNTLDLQMNSLRPEDTALYYCAP

SEQ ID NO: 3680 - protein, 39 aa, synthetic construct
YAESVKGRFTISRDNAKNTLSLQMNSLRPEDTALYYCAA

SEQ ID NO: 3681 - protein, 39 aa, synthetic construct
YAESVKGRFTISRDNAKNTLSLQMNSLRPEDTALYYCAG

SEQ ID NO: 3682 - protein, 39 aa, synthetic construct
YAESVKGRFTISRDNAKNTLSLQMNSLRPEDTALYYCAP

SEQ ID NO: 3683 - protein, 39 aa, synthetic construct
YAESVKGRFTISRDNAKNTLYLQMNSLRPEDTALYYCAA

SEQ ID NO: 3684 - protein, 39 aa, synthetic construct
YAESVKGRFTISRDNAKNTLYLQMNSLRPEDTALYYCAG

SEQ ID NO: 3685 - protein, 39 aa, synthetic construct
YAESVKGRFTISRDNAKNTLYLQMNSLRPEDTALYYCAP

SEQ ID NO: 3686 - protein, 39 aa, synthetic construct
YAESVKGRFTISRDNAKNTMYLQMNSLRPEDTALYYCAA

SEQ ID NO: 3687 - protein, 39 aa, synthetic construct
YAESVKGRFTISRDNAKNTVYLQMNSLRPEDTALYYCAA

SEQ ID NO: 3688 - protein, 39 aa, synthetic construct
YAFSVKGRFTISRDNAKNTMYLQMNSLRPEDTALYYCAA

SEQ ID NO: 3689 - protein, 39 aa, synthetic construct
YAGSVKGRFTISRDNAKNTLYLQMNSLRPEDTALYYCAA

SEQ ID NO: 3690 - protein, 39 aa, synthetic construct
YAGSVKGRFTISRDNAKNTLYLQMNSLRPEDTALYYCAP

SEQ ID NO: 3691 - protein, 39 aa, synthetic construct
YAGSVKGRFTISRDNAKNTMYLQMNSLRPEDTALYYCAA

SEQ ID NO: 3692 - protein, 39 aa, synthetic construct
YAHSVKGRFTISRDNAKNTMYLQMNSLRPEDTALYYCAA

SEQ ID NO: 3693 - protein, 39 aa, synthetic construct
YAISVKGRFTISRDNAKNTMYLQMNSLRPEDTALYYCAA

SEQ ID NO: 3694 - protein, 39 aa, synthetic construct
YAKSVKGRFTISRDNAKNTMYLQMNSLRPEDTALYYCAA

SEQ ID NO: 3695 - protein, 39 aa, synthetic construct
YALSVKGRFTISRDNAKNTMYLQMNSLRPEDTALYYCAA

SEQ ID NO: 3696 - protein, 39 aa, synthetic construct
YAPSVKGRFTISRDNAKNTMYLQMNSLRPEDTALYYCAA

SEQ ID NO: 3697 - protein, 39 aa, synthetic construct
YAQSVKGRFTISRDNAKNTMYLQMNSLRPEDTALYYCAA

SEQ ID NO: 3698 - protein, 39 aa, synthetic construct
YARSVKGRFTISRDNAKNTMYLQMNSLRPEDTALYYCAA

SEQ ID NO: 3699 - protein, 39 aa, synthetic construct
YASSVKGRFTISRDNAKNTMYLQMNSLRPEDTALYYCAA

SEQ ID NO: 3700 - protein, 39 aa, synthetic construct
YATSVKGRFTISRDNAKNTMYLQMNSLRPEDTALYYCAA

SEQ ID NO: 3701 - protein, 39 aa, synthetic construct
YAVSVKGRFTISRDNAKNTMYLQMNSLRPEDTALYYCAA

SEQ ID NO: 3702 - protein, 39 aa, synthetic construct
YAYSVKGRFTISRDNAKNTMYLQMNSLRPEDTALYYCAA

SEQ ID NO: 3703 - protein, 39 aa, synthetic construct
YDDSMKGRFTISRDNAKNTMYLQMNSLRPEDTALYFCAA

SEQ ID NO: 3704 - protein, 39 aa, synthetic construct
YEDPMKGRFTISRDNAKNTMYLQMNSLRPEDTALYFCAA

SEQ ID NO: 3705 - protein, 39 aa, synthetic construct
YEDSAKGRFTISRDNAKNTMYLQMNSLRPEDTALYFCAA

SEQ ID NO: 3706 - protein, 39 aa, synthetic construct
YEDSDKGRFTISRDNAKNTMYLQMNSLRPEDTALYFCAA

SEQ ID NO: 3707 - protein, 39 aa, synthetic construct
YEDSEKGRFTISRDNAKNTMYLQMNSLRPEDTALYFCAA

SEQ ID NO: 3708 - protein, 39 aa, synthetic construct
YEDSGKGRFTISRDNAKNTMYLQMNSLRPEDTALYFCAA

SEQ ID NO: 3709 - protein, 39 aa, synthetic construct
YEDSIKGRFTISRDNAKNTMYLQMNSLRPEDTALYFCAA

SEQ ID NO: 3710 - protein, 39 aa, synthetic construct
YEDSKKGRFTISRDNAKNTMYLQMNSLRPEDTALYFCAA

SEQ ID NO: 3711 - protein, 39 aa, synthetic construct
YEDSLKGRFTISRDNAKNTMYLQMNSLRPEDTALYFCAA

SEQ ID NO: 3712 - protein, 39 aa, synthetic construct
YEDSMKGRFTISRDAAKNTMYLQMNSLRPEDTALYFCAA

SEQ ID NO: 3713 - protein, 39 aa, synthetic construct
YEDSMKGRFTISRDDAKNTMYLQMNSLRPEDTALYFCSA

SEQ ID NO: 3714 - protein, 39 aa, synthetic construct
YEDSMKGRFTISRDEAKNTMYLQMNSLRPEDTALYFCAA

SEQ ID NO: 3715 - protein, 39 aa, synthetic construct
YEDSMKGRFTISRDFAKNTMYLQMNSLRPEDTALYFCAA

SEQ ID NO: 3716 - protein, 39 aa, synthetic construct
YEDSMKGRFTISRDGAKNTMYLQMNSLRPEDTALYFCAA

SEQ ID NO: 3717 - protein, 39 aa, synthetic construct
YEDSMKGRFTISRDHAKNTMYLQMNSLRPEDTALYFCAA

SEQ ID NO: 3718 - protein, 39 aa, synthetic construct
YEDSMKGRFTISRDIAKNTMYLQMNSLRPEDTALYFCAA

SEQ ID NO: 3719 - protein, 39 aa, synthetic construct
YEDSMKGRFTISRDKAKNTMYLQMNSLRPEDTALYFCAA

SEQ ID NO: 3720 - protein, 39 aa, synthetic construct
YEDSMKGRFTISRDLAKNTMYLQMNSLRPEDTALYFCAA

SEQ ID NO: 3721 - protein, 39 aa, synthetic construct
YEDSMKGRFTISRDNAENTMYLQMNSLRPEDTALYFCAA

SEQ ID NO: 3722 - protein, 39 aa, synthetic construct
YEDSMKGRFTISRDNAKNTAYLQMNSLRPEDTALYFCAA

SEQ ID NO: 3723 - protein, 39 aa, synthetic construct
YEDSMKGRFTISRDNAKNTEYLQMNSLRPEDTALYFCAA

SEQ ID NO: 3724 - protein, 39 aa, synthetic construct
YEDSMKGRFTISRDNAKNTFYLQMNSLRPEDTALYFCAA

SEQ ID NO: 3725 - protein, 39 aa, synthetic construct
YEDSMKGRFTISRDNAKNTGYLQMNSLRPEDTALYFCAA

SEQ ID NO: 3726 - protein, 39 aa, synthetic construct
YEDSMKGRFTISRDNAKNTHYLQMNSLRPEDTALYFCAA

SEQ ID NO: 3727 - protein, 39 aa, synthetic construct
YEDSMKGRFTISRDNAKNTIYLQMNSLRPEDTALYFCAA

SEQ ID NO: 3728 - protein, 39 aa, synthetic construct
YEDSMKGRFTISRDNAKNTKYLQMNSLRPEDTALYFCAA

SEQ ID NO: 3729 - protein, 39 aa, synthetic construct
YEDSMKGRFTISRDNAKNTLYLQMNSLRPEDTALYFCAA

SEQ ID NO: 3730 - protein, 39 aa, synthetic construct
YEDSMKGRFTISRDNAKNTMDLQMNSLRPEDTALYFCAA

SEQ ID NO: 3731 - protein, 39 aa, synthetic construct
YEDSMKGRFTISRDNAKNTMSLQMNSLRPEDTALYFCAA

SEQ ID NO: 3732 - protein, 39 aa, synthetic construct
YEDSMKGRFTISRDNAKNTMYLQMNSLKPEDTARYFCAA

SEQ ID NO: 3733 - protein, 39 aa, synthetic construct
YEDSMKGRFTISRDNAKNTMYLQMNSLRPEDTALYDCAA

SEQ ID NO: 3734 - protein, 39 aa, synthetic construct
YEDSMKGRFTISRDNAKNTMYLQMNSLRPEDTALYECAA

SEQ ID NO: 3735 - protein, 39 aa, synthetic construct
YEDSMKGRFTISRDNAKNTMYLQMNSLRPEDTALYFCAA

SEQ ID NO: 3736 - protein, 39 aa, synthetic construct
YEDSMKGRFTISRDNAKNTMYLQMNSLRPEDTALYFCAD

SEQ ID NO: 3737 - protein, 39 aa, synthetic construct
YEDSMKGRFTISRDNAKNTMYLQMNSLRPEDTALYFCAE

SEQ ID NO: 3738 - protein, 39 aa, synthetic construct
YEDSMKGRFTISRDNAKNTMYLQMNSLRPEDTALYFCAF

SEQ ID NO: 3739 - protein, 39 aa, synthetic construct
YEDSMKGRFTISRDNAKNTMYLQMNSLRPEDTALYFCAG

SEQ ID NO: 3740 - protein, 39 aa, synthetic construct
YEDSMKGRFTISRDNAKNTMYLQMNSLRPEDTALYFCAH

SEQ ID NO: 3741 - protein, 39 aa, synthetic construct
YEDSMKGRFTISRDNAKNTMYLQMNSLRPEDTALYFCAI

SEQ ID NO: 3742 - protein, 39 aa, synthetic construct
YEDSMKGRFTISRDNAKNTMYLQMNSLRPEDTALYFCAK

SEQ ID NO: 3743 - protein, 39 aa, synthetic construct
YEDSMKGRFTISRDNAKNTMYLQMNSLRPEDTALYFCAL

SEQ ID NO: 3744 - protein, 39 aa, synthetic construct
YEDSMKGRFTISRDNAKNTMYLQMNSLRPEDTALYFCAP

SEQ ID NO: 3745 - protein, 39 aa, synthetic construct
YEDSMKGRFTISRDNAKNTMYLQMNSLRPEDTALYFCAR

SEQ ID NO: 3746 - protein, 39 aa, synthetic construct
YEDSMKGRFTISRDNAKNTMYLQMNSLRPEDTALYFCAS

SEQ ID NO: 3747 - protein, 39 aa, synthetic construct
YEDSMKGRFTISRDNAKNTMYLQMNSLRPEDTALYFCAT

SEQ ID NO: 3748 - protein, 39 aa, synthetic construct
YEDSMKGRFTISRDNAKNTMYLQMNSLRPEDTALYFCAV

SEQ ID NO: 3749 - protein, 39 aa, synthetic construct
YEDSMKGRFTISRDNAKNTMYLQMNSLRPEDTALYFCAY

SEQ ID NO: 3750 - protein, 39 aa, synthetic construct
YEDSMKGRFTISRDNAKNTMYLQMNSLRPEDTALYFCDA

SEQ ID NO: 3751 - protein, 39 aa, synthetic construct
YEDSMKGRFTISRDNAKNTMYLQMNSLRPEDTALYFCEA

SEQ ID NO: 3752 - protein, 39 aa, synthetic construct
YEDSMKGRFTISRDNAKNTMYLQMNSLRPEDTALYFCFA

SEQ ID NO: 3753 - protein, 39 aa, synthetic construct
YEDSMKGRFTISRDNAKNTMYLQMNSLRPEDTALYFCGA

SEQ ID NO: 3754 - protein, 39 aa, synthetic construct
YEDSMKGRFTISRDNAKNTMYLQMNSLRPEDTALYFCHA

SEQ ID NO: 3755 - protein, 39 aa, synthetic construct
YEDSMKGRFTISRDNAKNTMYLQMNSLRPEDTALYFCIA

SEQ ID NO: 3756 - protein, 39 aa, synthetic construct
YEDSMKGRFTISRDNAKNTMYLQMNSLRPEDTALYFCLA

SEQ ID NO: 3757 - protein, 39 aa, synthetic construct
YEDSMKGRFTISRDNAKNTMYLQMNSLRPEDTALYFCPA

SEQ ID NO: 3758 - protein, 39 aa, synthetic construct
YEDSMKGRFTISRDNAKNTMYLQMNSLRPEDTALYFCQA

SEQ ID NO: 3759 - protein, 39 aa, synthetic construct
YEDSMKGRFTISRDNAKNTMYLQMNSLRPEDTALYFCRA

SEQ ID NO: 3760 - protein, 39 aa, synthetic construct
YEDSMKGRFTISRDNAKNTMYLQMNSLRPEDTALYFCSA

SEQ ID NO: 3761 - protein, 39 aa, synthetic construct
YEDSMKGRFTISRDNAKNTMYLQMNSLRPEDTALYFCTA

SEQ ID NO: 3762 - protein, 39 aa, synthetic construct
YEDSMKGRFTISRDNAKNTMYLQMNSLRPEDTALYFCVA

SEQ ID NO: 3763 - protein, 39 aa, synthetic construct
YEDSMKGRFTISRDNAKNTMYLQMNSLRPEDTALYFCYA

SEQ ID NO: 3764 - protein, 39 aa, synthetic construct
YEDSMKGRFTISRDNAKNTMYLQMNSLRPEDTALYGCAA

SEQ ID NO: 3765 - protein, 39 aa, synthetic construct
YEDSMKGRFTISRDNAKNTMYLQMNSLRPEDTALYHCAA

SEQ ID NO: 3766 - protein, 39 aa, synthetic construct
YEDSMKGRFTISRDNAKNTMYLQMNSLRPEDTALYICAA

SEQ ID NO: 3767 - protein, 39 aa, synthetic construct
YEDSMKGRFTISRDNAKNTMYLQMNSLRPEDTALYKCAA

SEQ ID NO: 3768 - protein, 39 aa, synthetic construct
YEDSMKGRFTISRDNAKNTMYLQMNSLRPEDTALYLCAA

SEQ ID NO: 3769 - protein, 39 aa, synthetic construct
YEDSMKGRFTISRDNAKNTMYLQMNSLRPEDTALYPCAA

SEQ ID NO: 3770 - protein, 39 aa, synthetic construct
YEDSMKGRFTISRDNAKNTMYLQMNSLRPEDTALYQCAA

SEQ ID NO: 3771 - protein, 39 aa, synthetic construct
YEDSMKGRFTISRDNAKNTMYLQMNSLRPEDTALYRCAA

SEQ ID NO: 3772 - protein, 39 aa, synthetic construct
YEDSMKGRFTISRDNAKNTMYLQMNSLRPEDTALYSCAA

SEQ ID NO: 3773 - protein, 39 aa, synthetic construct
YEDSMKGRFTISRDNAKNTMYLQMNSLRPEDTALYTCAA

SEQ ID NO: 3774 - protein, 39 aa, synthetic construct
YEDSMKGRFTISRDNAKNTMYLQMNSLRPEDTALYVCAA

SEQ ID NO: 3775 - protein, 39 aa, synthetic construct
YEDSMKGRFTISRDNAKNTMYLQMNSLRPEDTALYYCAA

SEQ ID NO: 3776 - protein, 39 aa, synthetic construct
YEDSMKGRFTISRDNAKNTMYLQMNSLRPEDTALYYCSA

SEQ ID NO: 3777 - protein, 39 aa, synthetic construct
YEDSMKGRFTISRDNAKNTPYLQMNSLRPEDTALYFCAA

SEQ ID NO: 3778 - protein, 39 aa, synthetic construct
YEDSMKGRFTISRDNAKNTRYLQMNSLRPEDTALYFCAA

SEQ ID NO: 3779 - protein, 39 aa, synthetic construct
YEDSMKGRFTISRDNAKNTSYLQMNSLRPEDTALYFCAA

SEQ ID NO: 3780 - protein, 39 aa, synthetic construct
YEDSMKGRFTISRDNAKNTTYLQMNSLRPEDTALYFCAA

SEQ ID NO: 3781 - protein, 39 aa, synthetic construct
YEDSMKGRFTISRDNAKNTVYLQMNSLRPEDTALYFCAA

SEQ ID NO: 3782 - protein, 39 aa, synthetic construct
YEDSMKGRFTISRDNAKNTYYLQMNSLRPEDTALYFCAA

SEQ ID NO: 3783 - protein, 39 aa, synthetic construct
YEDSMKGRFTISRDPAKNTMYLQMNSLRPEDTALYFCAA

SEQ ID NO: 3784 - protein, 39 aa, synthetic construct
YEDSMKGRFTISRDQAKNTMYLQMNSLRPEDTALYFCAA

SEQ ID NO: 3785 - protein, 39 aa, synthetic construct
YEDSMKGRFTISRDRAKNTMYLQMNSLRPEDTALYFCAA

SEQ ID NO: 3786 - protein, 39 aa, synthetic construct
YEDSMKGRFTISRDTAKNTMYLQMNSLRPEDTALYFCAA

SEQ ID NO: 3787 - protein, 39 aa, synthetic construct
YEDSMKGRFTISRDVAKNTMYLQMNSLRPEDTALYFCAA

SEQ ID NO: 3788 - protein, 39 aa, synthetic construct
YEDSMKGRFTISRDYAKNTMYLQMNSLRPEDTALYFCAA

SEQ ID NO: 3789 - protein, 39 aa, synthetic construct
YEDSPKGRFTISRDNAKNTMYLQMNSLRPEDTALYFCAA

SEQ ID NO: 3790 - protein, 39 aa, synthetic construct
YEDSQKGRFTISRDNAKNTMYLQMNSLRPEDTALYFCAA

SEQ ID NO: 3791 - protein, 39 aa, synthetic construct
YEDSRKGRFTISRDNAKNTMYLQMNSLRPEDTALYFCAA

SEQ ID NO: 3792 - protein, 39 aa, synthetic construct
YEDSSKGRFTISRDNAKNTMYLQMNSLRPEDTALYFCAA

SEQ ID NO: 3793 - protein, 39 aa, synthetic construct
YEDSTKGRFTISRDNAKNTMYLQMNSLRPEDTALYFCAA

SEQ ID NO: 3794 - protein, 39 aa, synthetic construct
YEDSVKGRFTISRDNAKNTLYLQMNSLRPEDTALYYCAA

SEQ ID NO: 3795 - protein, 39 aa, synthetic construct
YEDSVKGRFTISRDNAKNTMYLQMNSLRPEDTALYFCAA

SEQ ID NO: 3796 - protein, 39 aa, synthetic construct
YEDSVKGRFTISRDNAKNTMYLQMNSLRPEDTALYYCAA

SEQ ID NO: 3797 - protein, 39 aa, synthetic construct
YEDSVKGRFTISRDNAKNTVYLQMNSLRPEDTALYYCAA

SEQ ID NO: 3798 - protein, 39 aa, synthetic construct
YEDSYKGRFTISRDNAKNTMYLQMNSLRPEDTALYFCAA

SEQ ID NO: 3799 - protein, 39 aa, synthetic construct
YFDSMKGRFTISRDNAKNTMYLQMNSLRPEDTALYFCAA

SEQ ID NO: 3800 - protein, 39 aa, synthetic construct
YGDSMKGRFTISRDNAKNTMYLQMNSLRPEDTALYFCAA

SEQ ID NO: 3801 - protein, 39 aa, synthetic construct
YHDSMKGRFTISRDNAKNTMYLQMNSLRPEDTALYFCAA

SEQ ID NO: 3802 - protein, 39 aa, synthetic construct
YIDSMKGRFTISRDNAKNTMYLQMNSLRPEDTALYFCAA

SEQ ID NO: 3803 - protein, 39 aa, synthetic construct
YKDSMKGRFTISRDNAKNTMYLQMNSLRPEDTALYFCAA

SEQ ID NO: 3804 - protein, 39 aa, synthetic construct
YLDSMKGRFTISRDNAKNTMYLQMNSLRPEDTALYFCAA

SEQ ID NO: 3805 - protein, 39 aa, synthetic construct
YPDSMKGRFTISRDNAKNTMYLQMNSLRPEDTALYFCAA

SEQ ID NO: 3806 - protein, 39 aa, synthetic construct
YRDSMKGRFTISRDNAKNTMYLQMNSLRPEDTALYFCAA

SEQ ID NO: 3807 - protein, 39 aa, synthetic construct
YTDSMKGRFTISRDNAKNTMYLQMNSLRPEDTALYFCAA

SEQ ID NO: 3808 - protein, 39 aa, synthetic construct
YVDSMKGRFTISRDNAKNTMYLQMNSLRPEDTALYFCAA

SEQ ID NO: 3809 - protein, 39 aa, synthetic construct
YYDSMKGRFTISRDNAKNTMYLQMNSLRPEDTALYFCAA

SEQ ID NO: 3810 - protein, 10 aa, synthetic construct
RRMHSINAMA

SEQ ID NO: 3811 - protein, 39 aa, synthetic construct
YQDSVKGRFTLSRDNAKNTVYLQMNSLRPEDTALYSCAV

SEQ ID NO: 3812 - protein, 17 aa, synthetic construct
KIFSRTGTYSASWEYDF

SEQ ID NO: 3813 - protein, 17 aa, synthetic construct
KIFSKTGTYSAGWEYDF

SEQ ID NO: 3814-3815 - skipped (2 entries)

SEQ ID NO: 3816 - protein, 17 aa, synthetic construct
KIFSATGTYSASWEYDF

SEQ ID NO: 3817 - protein, 17 aa, synthetic construct
KIFSKTGTYSASWEYDH

SEQ ID NO: 3818 - protein, 17 aa, synthetic construct
KIFSKTGTYSASWEYDI

SEQ ID NO: 3819 - protein, 17 aa, synthetic construct
KIFSKTGTYSASWEYDK

SEQ ID NO: 3820 - protein, 17 aa, synthetic construct
KIFSKTGTYSASWEYDL

SEQ ID NO: 3821 - protein, 17 aa, synthetic construct
KIFSKTGTYSASWEYDP

SEQ ID NO: 3822 - protein, 17 aa, synthetic construct
KIFSKTGTYSASWEYDQ

SEQ ID NO: 3823 - skipped

SEQ ID NO: 3824 - protein, 17 aa, synthetic construct
KIFSKTGTYSASWEYDR

SEQ ID NO: 3825-3832 - skipped (8 entries)

SEQ ID NO: 3833 - protein, 17 aa, synthetic construct
KIFSKTGTYSAVWDYDF

SEQ ID NO: 3834 - protein, 17 aa, synthetic construct
KIFSKTGTYSAVWEYDF

SEQ ID NO: 3835 - protein, 17 aa, synthetic construct
KIFSKTGTYSAYWEYDF

SEQ ID NO: 3836 - protein, 17 aa, synthetic construct
KIFSKTGTYSDSWEYDF

SEQ ID NO: 3837 - protein, 17 aa, synthetic construct
KIFSKTGTYSESWEYDF

SEQ ID NO: 3838 - protein, 17 aa, synthetic construct
KIFSKTGTYSFSWEYDF

SEQ ID NO: 3839 - protein, 17 aa, synthetic construct
KIFSKTGTYSGSWEYDF

SEQ ID NO: 3840 - protein, 17 aa, synthetic construct
KIFSKTGTYSHSWEYDF

SEQ ID NO: 3841 - protein, 17 aa, synthetic construct
KIFSKTGTYSISWEYDF

SEQ ID NO: 3842 - protein, 17 aa, synthetic construct
KIFSKTGTYSKSWEYDF

SEQ ID NO: 3843 - protein, 17 aa, synthetic construct
KIFSKTGTYSLSWEYDF

SEQ ID NO: 3844 - protein, 17 aa, synthetic construct
KIFSKTGTYSPSWEYDF

SEQ ID NO: 3845 - protein, 17 aa, synthetic construct
KIFSKTGTYSRSWEYDF

SEQ ID NO: 3846 - protein, 17 aa, synthetic construct
KIFSKTGTYSSSWEYDF

SEQ ID NO: 3847 - protein, 17 aa, synthetic construct
KIFSKTGTYSTSWEYDF

SEQ ID NO: 3848 - protein, 17 aa, synthetic construct
KIFSKTGTYSVSWEYDF

SEQ ID NO: 3849 - protein, 17 aa, synthetic construct
KIFSKTGTYSYSWEYDF

SEQ ID NO: 3850 - protein, 17 aa, synthetic construct
KIFSKTGTYTASWEYDF

SEQ ID NO: 3851 - protein, 17 aa, synthetic construct
KIFSKTGTYVASWEYDF

SEQ ID NO: 3852 - protein, 17 aa, synthetic construct
KIFSKTGTYYASWEYDF

SEQ ID NO: 3853 - protein, 17 aa, synthetic construct
KIFSKTGVYSASWEYDF

SEQ ID NO: 3854 - protein, 17 aa, synthetic construct
KIFSKTGYYSASWEYDF

SEQ ID NO: 3855 - protein, 17 aa, synthetic construct
KIFSKTHTYSASWEYDF

SEQ ID NO: 3856 - protein, 17 aa, synthetic construct
KIFSKTITYSASWEYDF

SEQ ID NO: 3857 - protein, 17 aa, synthetic construct
KIFSKTKTYSASWEYDF

SEQ ID NO: 3858 - protein, 17 aa, synthetic construct
KIFSKTLTYSASWEYDF

SEQ ID NO: 3859 - protein, 17 aa, synthetic construct
KIFSKTPTYSASWEYDF

SEQ ID NO: 3860 - protein, 17 aa, synthetic construct
KIFSKTQTYSASWEYDF

SEQ ID NO: 3861 - protein, 17 aa, synthetic construct
KIFSKTRTYSASWEYDF

SEQ ID NO: 3862 - protein, 17 aa, synthetic construct
KIFSKTSTYSASWEYDF

SEQ ID NO: 3863 - protein, 17 aa, synthetic construct
KIFSKTTTYSASWEYDF

SEQ ID NO: 3864 - protein, 17 aa, synthetic construct
KIFSKTYTYSASWEYDF

SEQ ID NO: 3865 - protein, 17 aa, synthetic construct
KIFSKVGTYSASWEYDF

SEQ ID NO: 3866 - protein, 17 aa, synthetic construct
KIFSKYGTYSASWEYDF

SEQ ID NO: 3867 - protein, 17 aa, synthetic construct
KIFSLTGTYSASWEYDF

SEQ ID NO: 3868 - protein, 17 aa, synthetic construct
KIFSPTGTYSASWEYDF

SEQ ID NO: 3869 - protein, 17 aa, synthetic construct
KIFSSTGTYSASWEYDF

SEQ ID NO: 3870 - skipped

SEQ ID NO: 3871 - protein, 17 aa, synthetic construct
KQFSKTGTYSASWEYDF

SEQ ID NO: 3872 - skipped

SEQ ID NO: 3873 - protein, 17 aa, synthetic construct
KIVSKTGTYSASWEYDF

SEQ ID NO: 3874 - protein, 17 aa, synthetic construct
KIYSKTGTYSASWEYDF

SEQ ID NO: 3875 - protein, 17 aa, synthetic construct
KKFSKTGTYSASWEYDF

SEQ ID NO: 3876 - protein, 17 aa, synthetic construct
KLFSKTGTYSASWEYDF

SEQ ID NO: 3877 - protein, 17 aa, synthetic construct
KPFSKTGTYSASWEYDF

SEQ ID NO: 3878 - protein, 17 aa, synthetic construct
KSFSKTGTYSASWEYDF

SEQ ID NO: 3879 - protein, 17 aa, synthetic construct
KIRSKTGTYSASWEYDF

SEQ ID NO: 3880 - protein, 17 aa, synthetic construct
KILSKTGTYSASWEYDF

SEQ ID NO: 3881 - protein, 17 aa, synthetic construct
KIISKTGTYSASWEYDF

SEQ ID NO: 3882 - protein, 17 aa, synthetic construct
KIFTKTGTYSASWEYDF

SEQ ID NO: 3883 - protein, 10 aa, synthetic construct
GDTFVENDIG

SEQ ID NO: 3884-3891 - skipped (8 entries)

SEQ ID NO: 3892 - protein, 17 aa, synthetic construct
KIFSKTGTYAASWEYDF

SEQ ID NO: 3893-3899 - skipped (7 entries)

SEQ ID NO: 3900 - protein, 17 aa, synthetic construct
KIFSKTGTYSASWEFDF

SEQ ID NO: 3901-3904 - skipped (4 entries)

SEQ ID NO: 3905 - protein, 17 aa, synthetic construct
KIFSKTGTYSASWEYDG

SEQ ID NO: 3906-3916 - skipped (11 entries)

SEQ ID NO: 3917 - protein, 17 aa, synthetic construct
KIFSKTGTYSASWEYHF

SEQ ID NO: 3918 - protein, 17 aa, synthetic construct
KIFSKTGTYSASWEYKF

SEQ ID NO: 3919 - protein, 17 aa, synthetic construct
KIFSKTGTYSASWEYVF

SEQ ID NO: 3920 - protein, 17 aa, synthetic construct
KIFSKTGTYSASWGYDF

SEQ ID NO: 3921 - protein, 17 aa, synthetic construct
KIFSKTGTYSASWQYDF

SEQ ID NO: 3922 - protein, 148 aa, Homo sapiens
PGWFLDSPDRPWNPPTFSPALLVVTEGDNATFTCSFSNTSESFVLNWYRMSPSNQTDKLAAFPEDRSQPGQDCRFRVTQLPNGRDFHMSVVRARRNDSGTYLCGAISLAPKAQIKESLRAELRVTERRAEVPTAHPSPSPRPAGQFQT

SEQ ID NO: 3923 - protein, 148 aa, Macaca fascicularis
PGWFLESPDRPWNAPTFSPALLLVTEGDNATFTCSFSNASESFVLNWYRMSPSNQTDKLAAFPEDRSQPGQDCRFRVTRLPNGRDFHMSVVRARRNDSGTYLCGAISLAPKAQIKESLRAELRVTERRAEVPTAHPSPSPRPAGQFQA

SEQ ID NO: 3924-3928 - skipped (5 entries)

SEQ ID NO: 3929 - protein, 17 aa, synthetic construct
KIFSKTGTYSASWLYDF

SEQ ID NO: 3930 - protein, 17 aa, synthetic construct
KIFGKTGTYSASWEYDF

SEQ ID NO: 3931 - skipped

SEQ ID NO: 3932 - protein, 17 aa, synthetic construct
KIFLKTGTYSASWEYDF

SEQ ID NO: 3933 - protein, 17 aa, synthetic construct
KIFKKTGTYSASWEYDF

SEQ ID NO: 3934 - protein, 17 aa, synthetic construct
KIFSKSGTYSASWEYDF

SEQ ID NO: 3935 - protein, 17 aa, synthetic construct
KIFSKTGTYSASTEYDF

SEQ ID NO: 3936 - protein, 17 aa, synthetic construct
KIFSKTATYSASWEYDF

SEQ ID NO: 3937 - protein, 17 aa, synthetic construct
KIFSKTDTYSASWEYDF

SEQ ID NO: 3938 - protein, 17 aa, synthetic construct
KIFSKTETYSASWEYDF

SEQ ID NO: 3939 - protein, 17 aa, synthetic construct
KIFSKTGAYSASWEYDF

SEQ ID NO: 3940 - protein, 17 aa, synthetic construct
KIFSKTGEYSASWEYDF

SEQ ID NO: 3941 - protein, 17 aa, synthetic construct
KIFSKTGGYSASWEYDF

SEQ ID NO: 3942 - protein, 17 aa, synthetic construct
KIFSKTGHYSASWEYDF

SEQ ID NO: 3943 - protein, 17 aa, synthetic construct
KIFSKTGLYSASWEYDF

SEQ ID NO: 3944 - protein, 17 aa, synthetic construct
KIFSKTGQYSASWEYDF

SEQ ID NO: 3945 - protein, 17 aa, synthetic construct
KIFSKTGRYSASWEYDF

SEQ ID NO: 3946 - protein, 17 aa, synthetic construct
KIFSKTGSYSASWEYDF

SEQ ID NO: 3947 - skipped

SEQ ID NO: 3948 - protein, 17 aa, synthetic construct
KIFSKTGTESASWEYDF

SEQ ID NO: 3949 - protein, 17 aa, synthetic construct
KIFSKTGTFSASWEYDF

SEQ ID NO: 3950 - protein, 17 aa, synthetic construct
KIFSKTGTGSASWEYDF

SEQ ID NO: 3951 - protein, 17 aa, synthetic construct
KIFSKTGFYSASWEYDF

SEQ ID NO: 3952 - protein, 17 aa, synthetic construct
KIFSKTGKYSASWEYDF

SEQ ID NO: 3953 - protein, 17 aa, synthetic construct
KIFSKTGTDSASWEYDF

SEQ ID NO: 3954 - protein, 17 aa, synthetic construct
KIFSKTGPYSASWEYDF

SEQ ID NO: 3955 - skipped

SEQ ID NO: 3956 - protein, 17 aa, synthetic construct
KIFSKTGTKSASWEYDF

SEQ ID NO: 3957 - skipped

SEQ ID NO: 3958 - protein, 17 aa, synthetic construct
KIFSKTGTQSASWEYDF

SEQ ID NO: 3959 - protein, 17 aa, synthetic construct
KIFSKTGTRSASWEYDF

SEQ ID NO: 3960 - protein, 17 aa, synthetic construct
KIFSKTGTSSASWEYDF

SEQ ID NO: 3961 - protein, 17 aa, synthetic construct
KIFSKTGTTSASWEYDF

SEQ ID NO: 3962 - protein, 17 aa, synthetic construct
KIFSKTGTVSASWEYDF

SEQ ID NO: 3963 - protein, 17 aa, synthetic construct
KIFSVTGTYSASWEYDF

SEQ ID NO: 3964 - protein, 17 aa, synthetic construct
KIFSYTGTYSASWEYDF

SEQ ID NO: 3965 - protein, 17 aa, synthetic construct
KIFVKTGTYSASWEYDF

SEQ ID NO: 3966 - protein, 17 aa, synthetic construct
KIGSKTGTYSASWEYDF

SEQ ID NO: 3967 - protein, 17 aa, synthetic construct
KIHSKTGTYSASWEYDF

SEQ ID NO: 3968 - protein, 17 aa, synthetic construct
KIKSKTGTYSASWEYDF

SEQ ID NO: 3969 - protein, 17 aa, synthetic construct
KIQSKTGTYSASWEYDF

SEQ ID NO: 3970 - protein, 17 aa, synthetic construct
KISSKTGTYSASWEYDF

SEQ ID NO: 3971 - protein, 17 aa, synthetic construct
KITSKTGTYSASWEYDF

SEQ ID NO: 3972 - protein, 39 aa, synthetic construct
YVDSVKGRFTISRDNSKNTIYLQMNSLRPEDTALYYCAA

SEQ ID NO: 3973 - protein, 17 aa, synthetic construct
KIFSKTGTLSASWEYDF

SEQ ID NO: 3974 - protein, 17 aa, synthetic construct
KRFSKTGTYSASWEYDF

SEQ ID NO: 3975 - protein, 17 aa, synthetic construct
KTFSKTGTYSASWEYDF

SEQ ID NO: 3976 - protein, 17 aa, synthetic construct
KVFSKTGTYSASWEYDF

SEQ ID NO: 3977 - protein, 17 aa, synthetic construct
KYFSKTGTYSASWEYDF

SEQ ID NO: 3978 - protein, 17 aa, synthetic construct
LIFSKTGTYSASWEYDF

SEQ ID NO: 3979 - protein, 17 aa, synthetic construct
PIFSKTGTYSASWEYDF

SEQ ID NO: 3980 - protein, 17 aa, synthetic construct
QIFSKTGTYSASWEYDF

SEQ ID NO: 3981 - protein, 17 aa, synthetic construct
RIFSKTGTYSASWEYDF

SEQ ID NO: 3982 - protein, 17 aa, synthetic construct
KIFSKTGTYSAHWEYDF

SEQ ID NO: 3983 - protein, 17 aa, synthetic construct
SIFSKTGTYSASWEYDF

SEQ ID NO: 3984 - protein, 17 aa, synthetic construct
TIFSKTGTYSASWEYDF

SEQ ID NO: 3985 - protein, 17 aa, synthetic construct
VIFSKTGTYSASWEYDF

SEQ ID NO: 3986 - protein, 17 aa, synthetic construct
YIFSKTGTYSASWEYDF

SEQ ID NO: 3987 - protein, 17 aa, synthetic construct
KIFSKTGTYDASWEYDF

SEQ ID NO: 3988 - protein, 17 aa, synthetic construct
KIFSKTGTYEASWEYDF

SEQ ID NO: 3989 - protein, 17 aa, synthetic construct
KIFSKTGTYFASWEYDF

SEQ ID NO: 3990 - protein, 17 aa, synthetic construct
KIFSKTGTYGASWEYDF

SEQ ID NO: 3991 - protein, 17 aa, synthetic construct
KIFSKTGTYHASWEYDF

SEQ ID NO: 3992 - protein, 17 aa, synthetic construct
KIFSKTGTYIASWEYDF

SEQ ID NO: 3993 - protein, 17 aa, synthetic construct
KIFSKTGTYKASWEYDF

SEQ ID NO: 3994 - protein, 17 aa, synthetic construct
KIFSKTGTYLASWEYDF

SEQ ID NO: 3995 - protein, 17 aa, synthetic construct
KIFSKTGTYPASWEYDF

SEQ ID NO: 3996 - protein, 17 aa, synthetic construct
KIFSKTGTYQASWEYDF

SEQ ID NO: 3997 - protein, 17 aa, synthetic construct
KIFSKTGTYRASWEYDF

SEQ ID NO: 3998 - protein, 17 aa, synthetic construct
KIFSKTGTYSAAWEYDF

SEQ ID NO: 3999 - protein, 17 aa, synthetic construct
KIFSKTGTYSADWEYDF

SEQ ID NO: 4000 - protein, 17 aa, synthetic construct
KIFSKTGTYSAEWEYDF

SEQ ID NO: 4001 - protein, 17 aa, synthetic construct
KIFSKTGTYSAFWEYDF

SEQ ID NO: 4002 - protein, 17 aa, synthetic construct
KIFSKTGTYSAIWEYDF

SEQ ID NO: 4003 - protein, 17 aa, synthetic construct
KIFSKTGTYSAKWEYDF

SEQ ID NO: 4004 - protein, 17 aa, synthetic construct
KIFSDTGTYSASWEYDF

SEQ ID NO: 4005 - protein, 17 aa, synthetic construct
KIFSKTGTYSALWEYDF

SEQ ID NO: 4006 - protein, 17 aa, synthetic construct
KIFSETGTYSASWEYDF

SEQ ID NO: 4007 - protein, 17 aa, synthetic construct
KIFSKTGTYSAPWEYDF

SEQ ID NO: 4008 - protein, 17 aa, synthetic construct
KIFSFTGTYSASWEYDF

SEQ ID NO: 4009 - protein, 17 aa, synthetic construct
KIFSKTGTYSARWEYDF

SEQ ID NO: 4010 - protein, 17 aa, synthetic construct
KIFSGTGTYSASWEYDF

SEQ ID NO: 4011 - protein, 17 aa, synthetic construct
KIFSKTGTYSASAEYDF

SEQ ID NO: 4012 - protein, 17 aa, synthetic construct
KIFSHTGTYSASWEYDF

SEQ ID NO: 4013 - protein, 17 aa, synthetic construct
KIFSKTGTYSASDEYDF

SEQ ID NO: 4014 - protein, 17 aa, synthetic construct
KIFSITGTYSASWEYDF

SEQ ID NO: 4015 - protein, 17 aa, synthetic construct
KIFSKTGTYSASEEYDF

SEQ ID NO: 4016 - protein, 17 aa, synthetic construct
KIFSKAGTYSASWEYDF

SEQ ID NO: 4017 - protein, 17 aa, synthetic construct
KIFSKTGTYSASFEYDF

SEQ ID NO: 4018 - protein, 17 aa, synthetic construct
KIFSKDGTYSASWEYDF

SEQ ID NO: 4019 - protein, 17 aa, synthetic construct
KIFSKTGTYSASGEYDF

SEQ ID NO: 4020 - protein, 17 aa, synthetic construct
KIFSKFGTYSASWEYDF

SEQ ID NO: 4021 - protein, 17 aa, synthetic construct
KIFSKTGTYSASHEYDF

SEQ ID NO: 4022 - protein, 17 aa, synthetic construct
KIFSKTGTYSASWEYDS

SEQ ID NO: 4023 - protein, 17 aa, synthetic construct
KIFSKGGTYSASWEYDF

SEQ ID NO: 4024 - protein, 17 aa, synthetic construct
KIFSKTGTYSASIEYDF

SEQ ID NO: 4025 - protein, 17 aa, synthetic construct
KIFSKTGTYSASWEYDT

SEQ ID NO: 4026 - protein, 17 aa, synthetic construct
KIFSKHGTYSASWEYDF

SEQ ID NO: 4027 - protein, 17 aa, synthetic construct
KIFSKTGTYSASKEYDF

SEQ ID NO: 4028 - protein, 17 aa, synthetic construct
KIFSKTGTYSASWEYDV

SEQ ID NO: 4029 - protein, 17 aa, synthetic construct
KIFSKIGTYSASWEYDF

SEQ ID NO: 4030 - protein, 17 aa, synthetic construct
KIFSKTGTYSASLEYDF

SEQ ID NO: 4031 - protein, 17 aa, synthetic construct
KIFSKTGTYSASWEYDY

SEQ ID NO: 4032 - protein, 17 aa, synthetic construct
KIFSKKGTYSASWEYDF

SEQ ID NO: 4033 - protein, 17 aa, synthetic construct
KIFSKTGTISASWEYDF

SEQ ID NO: 4034 - protein, 17 aa, synthetic construct
KIFSKLGTYSASWEYDF

SEQ ID NO: 4035 - protein, 17 aa, synthetic construct
KIFSKTGTYSASQEYDF

SEQ ID NO: 4036 - protein, 17 aa, synthetic construct
KIFSKTGTYSASWYYDF

SEQ ID NO: 4037 - protein, 17 aa, synthetic construct
KIFSKPGTYSASWEYDF

SEQ ID NO: 4038 - protein, 17 aa, synthetic construct
KIFSKTGTYSASREYDF

SEQ ID NO: 4039 - protein, 17 aa, synthetic construct
KIFSKTGTYSASYEYDF

SEQ ID NO: 4040 - protein, 17 aa, synthetic construct
KIFSKQGTYSASWEYDF

SEQ ID NO: 4041 - protein, 17 aa, synthetic construct
KIFSKTGTYSASSDYDF

SEQ ID NO: 4042 - protein, 17 aa, synthetic construct
KIFSKTGTYSATWEYDF

SEQ ID NO: 4043 - protein, 17 aa, synthetic construct
KIFYKTGTYSASWEYDF

SEQ ID NO: 4044 - protein, 17 aa, synthetic construct
KIFSKTGTYSASWEYAF

SEQ ID NO: 4045 - protein, 17 aa, synthetic construct
KIFSKTGTYSASWEYDA

SEQ ID NO: 4046 - protein, 17 aa, synthetic construct
KIFSKTGTYSASWEYDD

SEQ ID NO: 4047 - protein, 17 aa, synthetic construct
KIFSKTGTYSASWEYDE

SEQ ID NO: 4048 - protein, 17 aa, synthetic construct
KIFSKTFTYSASWEYDF

SEQ ID NO: 4049 - protein, 121 aa, synthetic construct
DVQLVESGGGVVQPGGSLRLSCTPSGFTLYDHAVGWFRQAPGKEREGVSVISSSGAHEWYVDSVKGRFTIFRDISKNTIYLQMNSLRPEDTALYYCAAGGMWYSDDGSEYWGQGTLVTVSS

SEQ ID NO: 4050 - protein, 121 aa, synthetic construct
EVQLVESGGGVVQPGGSLRLSCTASGFTLYDHAVGWFRQAPGKEREGVSVISSSGAHEFYADSVKGRFTISRDISKNTVYLQMNSLRPEDTALYYCAAGGEWYSDAGSEYWGQGTLVTVSS

SEQ ID NO: 4051 - protein, 121 aa, synthetic construct
EVQLVESGGGVVQPGGSLRLSCTASGFTLYDHAVGWFRQAPGKEREGVSVISSSGAHEWYADSVKGRFTISRDISKNTVYLQMNSLRPEDTALYYCAAGGEWYSDVGSEYWGQGTLVTVSS

SEQ ID NO: 4052 - protein, 121 aa, synthetic construct
EVQLVESGGGVVQPGGSLRLSCTASGFTLYDHAVGWFRQAPGKEREGVSVISSSGAHEEYADSVKGRFTISRDISKNTVYLQMNSLRPEDTALYYCAAGGEWYSDVGSEYWGQGTLVTVSS

SEQ ID NO: 4053 - protein, 121 aa, synthetic construct
EVQLVESGGGVVQPGGSLRLSCTASGFTLYDHAVGWFRQAPGKEREGVSVISSSGAHEWYADSVKGRFTISRDISKNTVYLQMNSLRPEDTALYYCAAGGEWYSDSGSEYWGQGTLVTVSS

SEQ ID NO: 4054 - protein, 121 aa, synthetic construct
EVQLVESGGGVVQPGGSLRLSCTASGFTLYDHAVGWFRQAPGKEREGVSVISSSGAHEEYADSVKGRFTISRDISKNTVYLQMNSLRPEDTALYYCAAGGEWYSDSGSEYWGQGTLVTVSS

SEQ ID NO: 4055 - protein, 121 aa, synthetic construct
EVQLVESGGGVVQPGGSLRLSCTASGFTLYDHAVGWFRQAPGKEREGVSVISSSGAHEWYADSVKGRFTISRDISKNTVYLQMNSLRPEDTALYYCAAGGEWYSDAGSEYWGQGTLVTVSS

SEQ ID NO: 4056 - protein, 121 aa, synthetic construct
EVQLVESGGGLVQPGGSLRLSCTPSGFTLYDHAVGWFRQAPGKEREGVSVISSSGAHEWYVDSVKGRFTIFRDISKNTIYLQMNSLKPEDTAVYYCAAGGMWYSDDGSEYWGQGTLVTVSS

SEQ ID NO: 4057 - protein, 121 aa, synthetic construct
EVQLVESGGGVVQPGGSLRLSCTASGFTLYDHAVGWFRQAPGKEREGVSVISSSGAHEPYADSVKGRFTISRDISKNTVYLQMNSLRPEDTALYYCAAGGQWYSDSGSEYWGQGTLVTVSS

SEQ ID NO: 4058 - protein, 121 aa, synthetic construct
EVQLVESGGGVVQPGGSLRLSCTASGFTLYDHAVGWFRQAPGKEREGVSVISSSGAHEFYADSVKGRFTISRDISKNTVYLQMNSLRPEDTALYYCAAGGEWYSDVGSEYWGQGTLVTVSS

SEQ ID NO: 4059 - protein, 121 aa, synthetic construct
EVQLVESGGGVVQPGGSLRLSCTASGFTLYDHAVGWFRQAPGKEREGVSVISSSGAHEEYADSVKGRFTISRDISKNTVYLQMNSLRPEDTALYYCAAGGEWYSDAGSEYWGQGTLVTVSS

SEQ ID NO: 4060 - protein, 121 aa, synthetic construct
EVQLVESGGGVVQPGGSLRLSCTASGFTLYDHAVGWFRQAPGKEREGVSVISSSGAHEPYADSVKGRFTISRDISKNTVYLQMNSLRPEDTALYYCAAGGEWYSDAGSEYWGQGTLVTVSS

SEQ ID NO: 4061 - protein, 121 aa, synthetic construct
EVQLVESGGGVVQPGGSLRLSCTASGFTLYDHAVGWFRQAPGKEREGVSVISSSGAHEEYADSVKGRFTISRDISKNTVYLQMNSLRPEDTALYYCAAGGFWYSDEGSEYWGQGTLVTVSS

SEQ ID NO: 4062 - protein, 121 aa, synthetic construct
EVQLVESGGGVVQPGGSLRLSCTASGFTLYDHAVGWFRQAPGKEREGVSVISSSGAHEPYADSVKGRFTISRDISKNTVYLQMNSLRPEDTALYYCAAGGFWYSDEGSEYWGQGTLVTVSS

SEQ ID NO: 4063 - protein, 121 aa, synthetic construct
EVQLVESGGGVVQPGGSLRLSCTASGFTLYDHAVGWFRQAPGKEREGVSVISSSGAHEEYADSVKGRFTISRDISKNTVYLQMNSLRPEDTALYYCAAGGEWYSDEGSEYWGQGTLVTVSS

SEQ ID NO: 4064 - protein, 121 aa, synthetic construct
EVQLVESGGGVVQPGGSLRLSCTASGFTLYDHAVGWFRQAPGKEREGVSVISSSGAHEPYADSVKGRFTISRDISKNTVYLQMNSLRPEDTALYYCAAGGEWYSDEGSEYWGQGTLVTVSS

SEQ ID NO: 4065 - protein, 121 aa, synthetic construct
EVQLVESGGGVVQPGGSLRLSCTPSGFTLYDHAVQWFRQAPGKEREGVSVISSSGAHEWYVDSVKGRFTIFRDISKNTIYLQMNSLRPEDTALYYCAAGGMWYSDDGSEYWGQGTLVTVSS

SEQ ID NO: 4066 - protein, 121 aa, synthetic construct
EVQLVESGGGVVQPGGSLRLSCTASGFTLYDHAVGWFRQAPGKEREGVSVISSSGAHEFYADSVKGRFTISRDISKNTVYLQMNSLRPEDTALYYCAAGGEWYSDSGSEYWGQGTLVTVSS

SEQ ID NO: 4067 - protein, 121 aa, synthetic construct
EVQLVESGGGVVQPGGSLRLSCTPSGFTLYDHAVGWFRQAPGKEREGVSVISSSGAHEWYVDSVKGRFTIFRDISKNTIYLQMNSLRPEDTALYKCAAGGMWYSDDGSEYWGQGTLVTVSS

SEQ ID NO: 4068 - protein, 121 aa, synthetic construct
EVQLVESGGGVVQPGGSLRLSCTASGFTLYDHAVGWFRQAPGKEREGVSVISSSGAHEFYADSVKGRFTISRDISKNTVYLQMNSLRPEDTALYYCAAGGFWYSDEGSEYWGQGTLVTVSS

SEQ ID NO: 4069 - protein, 121 aa, synthetic construct
EVQLVESGGGVVQPGGSLRLSCTASGFTLYDHAVGWFRQAPGKEREGVSVISSSGAHEPYADSVKGRFTISRDISKNTVYLQMNSLRPEDTALYYCAAGGMWYSDAGSEYWGQGTLVTVSS

SEQ ID NO: 4070 - protein, 121 aa, synthetic construct
EVQLVESGGGVVQPGGSLRLSCTASGFTLYDHAVGWFRQAPGKEREGVSVISSSGAHEPYADSVKGRFTISRDISKNTVYLQMNSLRPEDTALYYCAAGGMWYSDEGSEYWGQGTLVTVSS

SEQ ID NO: 4071 - protein, 121 aa, synthetic construct
EVQLVESGGGVVQPGGSLRLSCTASGFTLYDHAVGWFRQAPGKEREGVSVISSSGAHEPYADSVKGRFTISRDISKNTVYLQMNSLRPEDTALYYCAAGGFWYSDVGSEYWGQGTLVTVSS

SEQ ID NO: 4072 - protein, 121 aa, synthetic construct
EVQLVESGGGVVQPGGSLRLSCTASGFTLYDHAVGWFRQAPGKEREGVSVISSSGAHEPYADSVKGRFTISRDISKNTVYLQMNSLRPEDTALYYCAAGGFWYSDSGSEYWGQGTLVTVSS

SEQ ID NO: 4073 - protein, 121 aa, synthetic construct
EVQLVESGGGVVQPGGSLRLSCTASGFTLYDHAVGWFRQAPGKEREGVSVISSSGAHEPYADSVKGRFTISRDISKNTVYLQMNSLRPEDTALYYCAAGGEWYSDVGSEYWGQGTLVTVSS

SEQ ID NO: 4074 - protein, 121 aa, synthetic construct
EVQLVESGGGVVQPGGSLRLSCTASGFTLYDHAVGWFRQAPGKEREGVSVISSSGAHEPYADSVKGRFTISRDISKNTVYLQMNSLRPEDTALYYCAAGGEWYSDSGSEYWGQGTLVTVSS

SEQ ID NO: 4075 - protein, 121 aa, synthetic construct
EVQLVESGGGVVQPGGSLRLSCTASGFTLYDHAVGWFRQAPGKEREGVSVISSSGAHEFYADSVKGRFTISRDISKNTVYLQMNSLRPEDTALYYCAAGGVWYSDVGSEYWGQGTLVTVSS

SEQ ID NO: 4076 - protein, 121 aa, synthetic construct
EVQLVESGGGVVQPGGSLRLSCTASGFTLYDHAVGWFRQAPGKEREGVSVISSSGAHEFYADSVKGRFTISRDISKNTVYLQMNSLRPEDTALYYCAAGGVWYSDSGSEYWGQGTLVTVSS

SEQ ID NO: 4077 - protein, 121 aa, synthetic construct
EVQLVESGGGVVQPGGSLRLSCTASGFTLYDHAVGWFRQAPGKEREGVSVISSSGAHEFYADSVKGRFTISRDISKNTVYLQMNSLRPEDTALYYCAAGGVWYSDAGSEYWGQGTLVTVSS

SEQ ID NO: 4078 - protein, 121 aa, synthetic construct
EVQLVESGGGVVQPGGSLRLSCTASGFTLYDHAVGWFRQAPGKEREGVSVISSSGAHEFYADSVKGRFTISRDISKNTVYLQMNSLRPEDTALYYCAAGGVWYSDEGSEYWGQGTLVTVSS

SEQ ID NO: 4079 - protein, 121 aa, synthetic construct
EVQLVESGGGVVQPGGSLRLSCTASGFTLYDHAVGWFRQAPGKEREGVSVISSSGAHEFYADSVKGRFTISRDISKNTVYLQMNSLRPEDTALYYCAAGGMWYSDVGSEYWGQGTLVTVSS

SEQ ID NO: 4080 - protein, 121 aa, synthetic construct
EVQLVESGGGVVQPGGSLRLSCTASGFTLYDHAVGWFRQAPGKEREGVSVISSSGAHEFYADSVKGRFTISRDISKNTVYLQMNSLRPEDTALYYCAAGGMWYSDSGSEYWGQGTLVTVSS

SEQ ID NO: 4081 - protein, 121 aa, synthetic construct
EVQLVESGGGVVQPGGSLRLSCTASGFTLYDHAVGWFRQAPGKEREGVSVISSSGAHEFYADSVKGRFTISRDISKNTVYLQMNSLRPEDTALYYCAAGGMWYSDAGSEYWGQGTLVTVSS

SEQ ID NO: 4082 - protein, 121 aa, synthetic construct
EVQLVESGGGVVQPGGSLRLSCTASGFTLYDHAVGWFRQAPGKEREGVSVISSSGAHEFYADSVKGRFTISRDISKNTVYLQMNSLRPEDTALYYCAAGGMWYSDEGSEYWGQGTLVTVSS

SEQ ID NO: 4083 - protein, 121 aa, synthetic construct
EVQLVESGGGVVQPGGSLRLSCTASGFTLYDHAVGWFRQAPGKEREGVSVISSSGAHEFYADSVKGRFTISRDISKNTVYLQMNSLRPEDTALYYCAAGGFWYSDVGSEYWGQGTLVTVSS

SEQ ID NO: 4084 - protein, 121 aa, synthetic construct
EVQLVESGGGVVQPGGSLRLSCTASGFTLYDHAVGWFRQAPGKEREGVSVISSSGAHEFYADSVKGRFTISRDISKNTVYLQMNSLRPEDTALYYCAAGGFWYSDSGSEYWGQGTLVTVSS

SEQ ID NO: 4085 - protein, 121 aa, synthetic construct
EVQLVESGGGVVQPGGSLRLSCTPSGFTLYDHAVEWFRQAPGKEREGVSVISSSGAHEWYVDSVKGRFTIFRDISKNTIYLQMNSLRPEDTALYYCAAGGMWYSDDGSEYWGQGTLVTVSS

SEQ ID NO: 4086 - protein, 121 aa, synthetic construct
EVQLVESGGGVVQPGGSLRLSCTASGFTLYDHAVGWFRQAPGKEREGVSVISSSGAHEPYADSVKGRFTISRDISKNTVYLQMNSLRPEDTALYYCAAGGQWYSDAGSEYWGQGTLVTVSS

SEQ ID NO: 4087 - protein, 121 aa, synthetic construct
EVQLVESGGGVVQPGGSLRLSCTASGFTLYDHAVGWFRQAPGKEREGVSVISSSGAHEEYADSVKGRFTISRDISKNTVYLQMNSLRPEDTALYYCAAGGQWYSDAGSEYWGQGTLVTVSS

SEQ ID NO: 4088 - protein, 121 aa, synthetic construct
EVQLVESGGGVVQPGGSLRLSCTASGFTLYDHAVGWFRQAPGKEREGVSVISSSGAHEPYADSVKGRFTISRDISKNTVYLQMNSLRPEDTALYYCAAGGMWYSDSGSEYWGQGTLVTVSS

SEQ ID NO: 4089 - protein, 121 aa, synthetic construct
EVQLVESGGGVVQPGGSLRLSCTASGFTLYDHAVGWFRQAPGKEREGVSVISSSGAHEFYADSVKGRFTISRDISKNTVYLQMNSLRPEDTALYYCAAGGFWYSDAGSEYWGQGTLVTVSS

SEQ ID NO: 4090 - protein, 121 aa, synthetic construct
EVQLVESGGGVVQPGGSLRLSCTPSGFTLYDHLVGWFRQAPGKEREGVSVISSSGAHEWYVDSVKGRFTIFRDISKNTIYLQMNSLRPEDTALYYCAAGGMWYSDDGSEYWGQGTLVTVSS

SEQ ID NO: 4091 - protein, 121 aa, synthetic construct
EVQLVESGGGVVQPGGSLRLSCTPSGFTLYDHSVGWFRQAPGKEREGVSVISSSGAHEWYVDSVKGRFTIFRDISKNTIYLQMNSLRPEDTALYYCAAGGMWYSDDGSEYWGQGTLVTVSS

SEQ ID NO: 4092 - protein, 121 aa, synthetic construct
EVQLVESGGGVVQPGGSLRLSCAPSGFTLYDHAVGWFRQAPGKEREGVSVISSSGAHEWYADSVKGRFTISRDNSKNTVYLQMNSLRPEDTALYYCAAGGMWYSDDGSEYWGQGTLVTVSS

SEQ ID NO: 4093 - protein, 121 aa, synthetic construct
EVQLVESGGGVVQPGGSLRLSCAASGFTLYDHAVGWFRQAPGKEREGVSVISSSGAHEWYADSVKGRFTISRDISKNTVYLQMNSLRPEDTALYYCAAGGMWYSDDGSEYWGQGTLVTVSS

SEQ ID NO: 4094 - protein, 121 aa, synthetic construct
EVQLVESGGGVVQPGGSLRLSCTASGFTLYDHAVGWFRQAPGKEREGVSVISSSGAHEWYADSVKGRFTISRDISKNTVYLQMNSLRPEDTALYYCAAGGMWYSDDGSEYWGQGTLVTVSS

SEQ ID NO: 4095 - protein, 121 aa, synthetic construct
EVQLVESGGGVVQPGGSLRLSCTPSGFTLYDHAVGWFRQAPGKEREGVSVISSSGAHEWYVDSVKGRFTIFRDISKNTIYLQMNSLRPEDTALYYCAAGGMWYSDDFSEYWGQGTLVTVSS

SEQ ID NO: 4096 - protein, 121 aa, synthetic construct
EVQLVESGGGVVQPGGSLRLSCTPSGFTLYDHAVGWFRQAPGKEREGVSVISSSGAHEWYVDSVKGRFTIFRDISKNTIYLQMNSLRPEDTALYYCAAGGMLYSDDPSEYWGQGTLVTVSS

SEQ ID NO: 4097 - protein, 121 aa, synthetic construct
EVQLVESGGGVVQPGGSLRLSCTPSGFTLYDHAVGWFRQAPGKEREGVSVISSSGAHEWYVDSVKGRFTIFRDISKNTIYLQMNSLRPEDTALYYCAAGGMWYSDDHSEYWGQGTLVTVSS

SEQ ID NO: 4098 - protein, 121 aa, synthetic construct
EVQLVESGGGVVQPGGSLRLSCTPSGFTLYDHDVGWFRQAPGKEREGVSVISSSGAHEWYVDSVKGRFTIFRDISKNTIYLQMNSLRPEDTALYYCAAGGMWYSDDGSEYWGQGTLVTVSS

SEQ ID NO: 4099 - protein, 121 aa, synthetic construct
EVQLVESGGGVVQPGGSLRLSCTPSGFTLYDHRVGWFRQAPGKEREGVSVISSSGAHEWYVDSVKGRFTIFRDISKNTIYLQMNSLRPEDTALYYCAAGGMWYSDDGSEYWGQGTLVTVSS

SEQ ID NO: 4100 - protein, 121 aa, synthetic construct
EVQLVESGGGVVQPGGSLRLSCTPSGFTLYDHAVHWFRQAPGKEREGVSVISSSGAHEWYVDSVKGRFTIFRDISKNTIYLQMNSLRPEDTALYYCAAGGMWYSDDGSEYWGQGTLVTVSS

SEQ ID NO: 4101 - protein, 121 aa, synthetic construct
EVQLVESGGGVVQPGGSLRLSCTPSGFTLYDHAVGWFRQAPGKEREGVSVISSSGAHEWYVDSVKGRFTIFRDISKNTIYLQMNSLRPEDTALYYCAAGGMWYSDDYSEYWGQGTLVTVSS

SEQ ID NO: 4102 - protein, 121 aa, synthetic construct
EVQLVESGGGVVQPGGSLRLSCTPSGFTLYDHAVGWFRQAPGKEREGVSVISSSGAHEWYVDSVKGRFTIFRDISKNTIYLQMNSLRPEDTALYYCAAGGMWYSDDISEYWGQGTLVTVSS

SEQ ID NO: 4103 - protein, 121 aa, synthetic construct
EVQLVESGGGVVQPGGSLRLSCTPSGFTLYDHAVGWFRQAPGKEREGVSVISSSGAHEWYVDSVKGRFTIFRDISKNTIYLQMNSLRPEDTALYYCAAGGMWYSDDRSEYWGQGTLVTVSS

SEQ ID NO: 4104 - protein, 121 aa, synthetic construct
EVQLVESGGGVVQPGGSLRLSCTPSGFTLYDHAVGWFRQAPGKEREGVSVISSSGAHEWYVDSVKGRFTIFRDISKNTIYLQMNSLRPEDTALYYCAAGGMWYSDDKSEYWGQGTLVTVSS

SEQ ID NO: 4105 - protein, 121 aa, synthetic construct
EVQLVESGGGVVQPGGSLRLSCTPSGFTLYDHAVGWFRQAPGKEREGVSVISSSGAHEWYVDSVKGRFTIFRDISKNTIYLQMNSLRPEDTALYYCAAGGMWYSDDLSEYWGQGTLVTVSS

SEQ ID NO: 4106 - protein, 121 aa, synthetic construct
EVQLVESGGGVVQPGGSLRLSCTPSGFTLYDHAVGWFRQAPGKEREGVSVISSSGAHEWYVDSVKGRFTIFRDISKNTIYLQMNSLRPEDTALYYCAAGGMWYSDDTSEYWGQGTLVTVSS

SEQ ID NO: 4107 - protein, 121 aa, synthetic construct
EVQLVESGGGVVQPGGSLRLSCTPSGFTLYDHKVGWFRQAPGKEREGVSVISSSGAHEWYVDSVKGRFTIFRDISKNTIYLQMNSLRPEDTALYYCAAGGMWYSDDGSEYWGQGTLVTVSS

SEQ ID NO: 4108 - protein, 121 aa, synthetic construct
EVQLVESGGGVVQPGGSLRLSCTPSGFTLYDHHVGWFRQAPGKEREGVSVISSSGAHEWYVDSVKGRFTIFRDISKNTIYLQMNSLRPEDTALYYCAAGGMWYSDDGSEYWGQGTLVTVSS

SEQ ID NO: 4109 - protein, 121 aa, synthetic construct
EVQLVESGGGVVQPGGSLRLSCTPSGFTLYDHQVGWFRQAPGKEREGVSVISSSGAHEWYVDSVKGRFTIFRDISKNTIYLQMNSLRPEDTALYYCAAGGMWYSDDGSEYWGQGTLVTVSS

SEQ ID NO: 4110 - protein, 121 aa, synthetic construct
EVQLVESGGGVVQPGGSLRLSCTPSGFTLYDHAVKWFRQAPGKEREGVSVISSSGAHEWYVDSVKGRFTIFRDISKNTIYLQMNSLRPEDTALYYCAAGGMWYSDDGSEYWGQGTLVTVSS

SEQ ID NO: 4111 - protein, 121 aa, synthetic construct
EVQLVESGGGVVQPGGSLRLSCTPSGFTLYDHAVGWFRQAPGKEREGVSVISSSGAHEWYVDSVKGRFTIFRDISKNTIYLQMNSLRPEDTALYYCAAGRMWYSDDSSEYWGQGTLVTVSS

SEQ ID NO: 4112 - protein, 121 aa, synthetic construct
EVQLVESGGGVVQPGGSLRLSCTPSGFTLYDHAVPWFRQAPGKEREGVSVISSSGAHEWYVDSVKGRFTIFRDISKNTIYLQMNSLRPEDTALYYCAAGGMWYSDDGSEYWGQGTLVTVSS

SEQ ID NO: 4113 - protein, 121 aa, synthetic construct
EVQLVESGGGVVQPGGSLRLSCTPSGFTLYDHAVYWFRQAPGKEREGVSVISSSGAHEWYVDSVKGRFTIFRDISKNTIYLQMNSLRPEDTALYYCAAGGMWYSDDGSEYWGQGTLVTVSS

SEQ ID NO: 4114 - protein, 121 aa, synthetic construct
EVQLVESGGGVVQPGGSLRLSCTPSGFTLYDHAVDWFRQAPGKEREGVSVISSSGAHEWYVDSVKGRFTIFRDISKNTIYLQMNSLRPEDTALYYCAAGGMWYSDDGSEYWGQGTLVTVSS

SEQ ID NO: 4115 - protein, 121 aa, synthetic construct
EVQLVESGGGVVQPGGSLRLSCTPSGFTLYDHTVGWFRQAPGKEREGVSVISSSGAHEWYVDSVKGRFTIFRDISKNTIYLQMNSLRPEDTALYYCAAGGMWYSDDGSEYWGQGTLVTVSS

SEQ ID NO: 4116 - protein, 121 aa, synthetic construct
EVQLVESGGGVVQPGGSLRLSCTPSGFTLYDHVVGWFRQAPGKEREGVSVISSSGAHEWYVDSVKGRFTIFRDISKNTIYLQMNSLRPEDTALYYCAAGGMWYSDDGSEYWGQGTLVTVSS

SEQ ID NO: 4117 - protein, 121 aa, synthetic construct
EVQLVESGGGVVQPGGSLRLSCTPSGFTLYDHYVGWFRQAPGKEREGVSVISSSGAHEWYVDSVKGRFTIFRDISKNTIYLQMNSLRPEDTALYYCAAGGMWYSDDGSEYWGQGTLVTVSS

SEQ ID NO: 4118 - protein, 121 aa, synthetic construct
EVQLVESGGGVVQPGGSLRLSCTPSGFTLYDHPVGWFRQAPGKEREGVSVISSSGAHEWYVDSVKGRFTIFRDISKNTIYLQMNSLRPEDTALYYCAAGGMWYSDDGSEYWGQGTLVTVSS

SEQ ID NO: 4119 - protein, 121 aa, synthetic construct
EVQLVESGGGVVQPGGSLRLSCTPSGFTLYDHAVIWFRQAPGKEREGVSVISSSGAHEWYVDSVKGRFTIFRDISKNTIYLQMNSLRPEDTALYYCAAGGMWYSDDGSEYWGQGTLVTVSS

SEQ ID NO: 4120 - protein, 121 aa, synthetic construct
EVQLVESGGGVVQPGGSLRLSCTPSGFTLYDHAVTWFRQAPGKEREGVSVISSSGAHEWYVDSVKGRFTIFRDISKNTIYLQMNSLRPEDTALYYCAAGGMWYSDDGSEYWGQGTLVTVSS

SEQ ID NO: 4121 - protein, 121 aa, synthetic construct
EVQLVESGGGVVQPGGSLRLSCTPSGFTLYDHIVGWFRQAPGKEREGVSVISSSGAHEWYVDSVKGRFTIFRDISKNTIYLQMNSLRPEDTALYYCAAGGMWYSDDGSEYWGQGTLVTVSS

SEQ ID NO: 4122 - protein, 121 aa, synthetic construct
EVQLVESGGGVVQPGGSLRLSCTPSGFTLYDHFVGWFRQAPGKEREGVSVISSSGAHEWYVDSVKGRFTIFRDISKNTIYLQMNSLRPEDTALYYCAAGGMWYSDDGSEYWGQGTLVTVSS

SEQ ID NO: 4123 - protein, 121 aa, synthetic construct
EVQLVESGGGVVQPGGSLRLSCTPSGFTLYDHGVGWFRQAPGKEREGVSVISSSGAHEWYVDSVKGRFTIFRDISKNTIYLQMNSLRPEDTALYYCAAGGMWYSDDGSEYWGQGTLVTVSS

SEQ ID NO: 4124 - protein, 121 aa, synthetic construct
EVQLVESGGGVVQPGGSLRLSCTPSGFTLYDHAVAWFRQAPGKEREGVSVISSSGAHEWYVDSVKGRFTIFRDISKNTIYLQMNSLRPEDTALYYCAAGGMWYSDDGSEYWGQGTLVTVSS

SEQ ID NO: 4125 - protein, 121 aa, synthetic construct
EVQLVESGGGVVQPGGSLRLSCTPSGFTLYDHAVSWFRQAPGKEREGVSVISSSGAHEWYVDSVKGRFTIFRDISKNTIYLQMNSLRPEDTALYYCAAGGMWYSDDGSEYWGQGTLVTVSS

SEQ ID NO: 4126 - protein, 121 aa, synthetic construct
EVQLVESGGGVVQPGGSLRLSCTPSGFTLYDHAVRWFRQAPGKEREGVSVISSSGAHEWYVDSVKGRFTIFRDISKNTIYLQMNSLRPEDTALYYCAAGGMWYSDDGSEYWGQGTLVTVSS

SEQ ID NO: 4127 - protein, 121 aa, synthetic construct
EVQLVESGGGVVQPGGSLRLSCTPSGFTLYDHAVVWFRQAPGKEREGVSVISSSGAHEWYVDSVKGRFTIFRDISKNTIYLQMNSLRPEDTALYYCAAGGMWYSDDGSEYWGQGTLVTVSS

SEQ ID NO: 4128 - protein, 121 aa, synthetic construct
EVQLVESGGGVVQPGGSLRLSCTASGFTLYDHAVGWFRQAPGKEREGVSVISSSGAHEPYADSVKGRFTISRDISKNTVYLQMNSLRPEDTALYYCAAGGMWYSDVGSEYWGQGTLVTVSS

SEQ ID NO: 4129 - protein, 121 aa, synthetic construct
EVQLVESGGGVVQPGGSLRLSCTPSGFTLYDHAVGWFRQAPGKEREGVSVISSSGAHEWYVDSVKGRFTIFRDISKNTIYLQMNSLRPEDTALYTCAAGGMWYSDDGSEYWGQGTLVTVSS

SEQ ID NO: 4130 - protein, 121 aa, synthetic construct
EVQLVESGGGVVQPGGSLRLSCTASGFTLYDHAVGWFRQAPGKEREGVSVISSSGAHEPYADSVKGRFTISRDISKNTVYLQMNSLRPEDTALYYCAAGGQWYSDVGSEYWGQGTLVTVSS

SEQ ID NO: 4131 - protein, 121 aa, synthetic construct
EVQLVESGGGVVQPGGSLRLSCTASGFTLYDHAVGWFRQAPGKEREGVSVPSSSGAHEWYADSVKGRFTISRDISKNTVSLQMNSLRPEDTALYYCAAGGMWYSGEGSEYWGQGTLVTVSS

SEQ ID NO: 4132 - protein, 121 aa, synthetic construct
EVQLVESGGGVVQPGGSLRLSCTASGFTLYDHAVGWFRQAPGKEREGVSVTSSSGAHEWYADSVKGRFTISRDISKNTVSLQMNSLRPEDTALYYCAAGGMWYSDEGSEYWGQGTLVTVSS

SEQ ID NO: 4133 - protein, 121 aa, synthetic construct
EVQLVESGGGVVQPGGSLRLSCTASGFTLYDHAFGWFRQAPGKEREGVSVSSSSGAHEWYADSVKGRFTISRDISKNTVSLQMNSLRPEDTALYYCAAGGMWYSDEGSEYWGQGTLVTVSS

SEQ ID NO: 4134 - protein, 121 aa, synthetic construct
EVQLVESGGGVVQPGGSLRLSCTASGFTLYDHAVGWFRQAPGKEREGVSVSSSSGAHEWYADSVKGRFTISRDISKNTVSLQMNSLRPEDTALYYCAAGGMWYSDEGSEYWGQGTLVTVSS

SEQ ID NO: 4135 - protein, 121 aa, synthetic construct
EVQLVESGGGVVQPGGSLRLSCTASGFTLYDHAFGWFRQAPGKEREGVSVRSSSGAHEWYADSVKGRFTISRDISKNTVSLQMNSLRPEDTALYYCAAGGMWYSDEGSEYWGQGTLVTVSS

SEQ ID NO: 4136 - protein, 121 aa, synthetic construct
EVQLVESGGGVVQPGGSLRLSCTASGFTLYDHAVGWFRQAPGKEREGVSVRSSSGAHEWYADSVKGRFTISRDISKNTVSLQMNSLRPEDTALYYCAAGGMWYSDEGSEYWGQGTLVTVSS

SEQ ID NO: 4137 - protein, 121 aa, synthetic construct
EVQLVESGGGVVQPGGSLRLSCTASGFTLYDHAVGWFRQAPGKEREGVSVGSSSGAHEWYADSVKGRFTISRDISKNTVSLQMNSLRPEDTALYYCAAGGMWYSGEGSEYWGQGTLVTVSS

SEQ ID NO: 4138 - protein, 121 aa, synthetic construct
EVQLVESGGGVVQPGGSLRLSCTASGFTLYDHAVGWFRQAPGKEREGVSVHSSSGAHEWYADSVKGRFTISRDISKNTVSLQMNSLRPEDTALYYCAAGGMWYSGEGSEYWGQGTLVTVSS

SEQ ID NO: 4139 - protein, 121 aa, synthetic construct
EVQLVESGGGVVQPGGSLRLSCTASGFTLYDHAFGWFRQAPGKEREGVSVHSSSGAHEWYADSVKGRFTISRDISKNTVSLQMNSLRPEDTALYYCAAGGMWYSGEGSEYWGQGTLVTVSS

SEQ ID NO: 4140 - protein, 121 aa, synthetic construct
EVQLVESGGGVVQPGGSLRLSCTASGFTLYDHAFGWFRQAPGKEREGVSVKSSSGAHEWYADSVKGRFTISRDISKNTVSLQMNSLRPEDTALYYCAAGGMWYSDEGSEYWGQGTLVTVSS

SEQ ID NO: 4141 - protein, 121 aa, synthetic construct
EVQLVESGGGVVQPGGSLRLSCTASGFTLYDHAFGWFRQAPGKEREGVSVGSSSGAHEWYADSVKGRFTISRDISKNTVSLQMNSLRPEDTALYYCAAGGMWYSDEGSEYWGQGTLVTVSS

SEQ ID NO: 4142 - protein, 121 aa, synthetic construct
EVQLVESGGGVVQPGGSLRLSCTASGFTLYDHAVGWFRQAPGKEREGVSVGSSSGAHEWYADSVKGRFTISRDISKNTVSLQMNSLRPEDTALYYCAAGGMWYSDEGSEYWGQGTLVTVSS

SEQ ID NO: 4143 - protein, 121 aa, synthetic construct
EVQLVESGGGVVQPGGSLRLSCTASGFTLYDHAFGWFRQAPGKEREGVSVPSSSGAHEWYADSVKGRFTISRDISKNTVSLQMNSLRPEDTALYYCAAGGMWYSDEGSEYWGQGTLVTVSS

SEQ ID NO: 4144 - protein, 121 aa, synthetic construct
EVQLVESGGGVVQPGGSLRLSCTASGFTLYDHAVGWFRQAPGKEREGVSVPSSSGAHEWYADSVKGRFTISRDISKNTVSLQMNSLRPEDTALYYCAAGGMWYSDEGSEYWGQGTLVTVSS

SEQ ID NO: 4145 - protein, 121 aa, synthetic construct
EVQLVESGGGVVQPGGSLRLSCTASGFTLYDHAVGWFRQAPGKEREGVSVISSSGAHEWYADSVKGRFTISRDISKNTVSLQMNSLRPEDTALYYCAAGGMWYSHEGSEYWGQGTLVTVSS

SEQ ID NO: 4146 - protein, 121 aa, synthetic construct
EVQLVESGGGVVQPGGSLRLSCTASGFTLYDHAVGWFRQAPGKEREGVSVKSSSGAHEWYADSVKGRFTISRDISKNTVSLQMNSLRPEDTALYYCAAGGMWYSDEGSEYWGQGTLVTVSS

SEQ ID NO: 4147 - protein, 121 aa, synthetic construct
EVQLVESGGGVVQPGGSLRLSCTASGFTLYDHAFGWFRQAPGKEREGVSVHSSSGAHEWYADSVKGRFTISRDISKNTVSLQMNSLRPEDTALYYCAAGGMWYSDEGSEYWGQGTLVTVSS

SEQ ID NO: 4148 - protein, 121 aa, synthetic construct
EVQLVESGGGVVQPGGSLRLSCTASGFTLYDHAVGWFRQAPGKEREGVSVHSSSGAHEWYADSVKGRFTISRDISKNTVSLQMNSLRPEDTALYYCAAGGMWYSDEGSEYWGQGTLVTVSS

SEQ ID NO: 4149 - protein, 121 aa, synthetic construct
EVQLVESGGGVVQPGGSLRLSCTASGFTLYDHAFGWFRQAPGKEREGVSVPSSSGAHEWYADSVKGRFTISRDISKNTVSLQMNSLRPEDTALYYCAAGGMWYSGEGSEYWGQGTLVTVSS

SEQ ID NO: 4150 - protein, 121 aa, synthetic construct
EVQLVESGGGVVQPGGSLRLSCTASGFTLYDHAFGWFRQAPGKEREGVSEISSSGAHEWYADSVKGRFTISRDISKNTVSLQMNSLRPEDTALYYCAAGGMWYSGEGSEYWGQGTLVTVSS

SEQ ID NO: 4151 - protein, 121 aa, synthetic construct
EVQLVESGGGVVQPGGSLRLSCTASGFTLYDHAVGWFRQAPGKEREGVSDISSSGAHEWYADSVKGRFTISRDISKNTVSLQMNSLRPEDTALYYCAAGGMWYSGEGSEYWGQGTLVTVSS

SEQ ID NO: 4152 - protein, 121 aa, synthetic construct
EVQLVESGGGVVQPGGSLRLSCTASGFTLYDHAFGWFRQAPGKEREGVSEISSSGAHEWYADSVKGRFTISRDISKNTVSLQMNSLRPEDTALYYCAAGGMWYSDEGSEYWGQGTLVTVSS

SEQ ID NO: 4153 - protein, 121 aa, synthetic construct
EVQLVESGGGVVQPGGSLRLSCTASGFTLYDHAVGWFRQAPGKEREGVSEISSSGAHEWYADSVKGRFTISRDISKNTVSLQMNSLRPEDTALYYCAAGGMWYSDEGSEYWGQGTLVTVSS

SEQ ID NO: 4154 - protein, 121 aa, synthetic construct
EVQLVESGGGVVQPGGSLRLSCTASGFTLYDHAFGWFRQAPGKEREGVSDISSSGAHEWYADSVKGRFTISRDISKNTVSLQMNSLRPEDTALYYCAAGGMWYSDEGSEYWGQGTLVTVSS

SEQ ID NO: 4155 - protein, 121 aa, synthetic construct
EVQLVESGGGVVQPGGSLRLSCTASGFTLYDHAVGWFRQAPGKEREGVSDISSSGAHEWYADSVKGRFTISRDISKNTVSLQMNSLRPEDTALYYCAAGGMWYSDEGSEYWGQGTLVTVSS

SEQ ID NO: 4156 - protein, 121 aa, synthetic construct
EVQLVESGGGVVQPGGSLRLSCTASGFTLYDHAVGWFRQAPGKEREGVSVISSSGAHEWYADSVKGRFTISRDISKNTVSLQMNSLRPEDTALYYCAAGGMWYSDEGSEYWGQGTLVTVSS

SEQ ID NO: 4157 - protein, 121 aa, synthetic construct
EVQLVESGGGVVQPGGSLRLSCTASGFTLYDHAFGWFRQAPGKEREGVSVTSSSGAHEWYADSVKGRFTISRDISKNTVSLQMNSLRPEDTALYYCAAGGMWYSGEGSEYWGQGTLVTVSS

SEQ ID NO: 4158 - protein, 121 aa, synthetic construct
EVQLVESGGGVVQPGGSLRLSCTASGFTLYDHAVGWFRQAPGKEREGVSVTSSSGAHEWYADSVKGRFTISRDISKNTVSLQMNSLRPEDTALYYCAAGGMWYSGEGSEYWGQGTLVTVSS

SEQ ID NO: 4159 - protein, 121 aa, synthetic construct
EVQLVESGGGVVQPGGSLRLSCTASGFTLYDHAFGWFRQAPGKEREGVSVSSSSGAHEWYADSVKGRFTISRDISKNTVSLQMNSLRPEDTALYYCAAGGMWYSGEGSEYWGQGTLVTVSS

SEQ ID NO: 4160 - protein, 121 aa, synthetic construct
EVQLVESGGGVVQPGGSLRLSCTASGFTLYDHAVGWFRQAPGKEREGVSVSSSSGAHEWYADSVKGRFTISRDISKNTVSLQMNSLRPEDTALYYCAAGGMWYSGEGSEYWGQGTLVTVSS

SEQ ID NO: 4161 - protein, 121 aa, synthetic construct
EVQLVESGGGVVQPGGSLRLSCTASGFTLYDHAFGWFRQAPGKEREGVSVRSSSGAHEWYADSVKGRFTISRDISKNTVSLQMNSLRPEDTALYYCAAGGMWYSGEGSEYWGQGTLVTVSS

SEQ ID NO: 4162 - protein, 121 aa, synthetic construct
EVQLVESGGGVVQPGGSLRLSCTASGFTLYDHAVGWFRQAPGKEREGVSVRSSSGAHEWYADSVKGRFTISRDISKNTVSLQMNSLRPEDTALYYCAAGGMWYSGEGSEYWGQGTLVTVSS

SEQ ID NO: 4163 - protein, 121 aa, synthetic construct
EVQLVESGGGVVQPGGSLRLSCTASGFTLYDHAFGWFRQAPGKEREGVSVKSSSGAHEWYADSVKGRFTISRDISKNTVSLQMNSLRPEDTALYYCAAGGMWYSGEGSEYWGQGTLVTVSS

SEQ ID NO: 4164 - protein, 121 aa, synthetic construct
EVQLVESGGGVVQPGGSLRLSCTASGFTLYDHAVGWFRQAPGKEREGVSVKSSSGAHEWYADSVKGRFTISRDISKNTVSLQMNSLRPEDTALYYCAAGGMWYSGEGSEYWGQGTLVTVSS

SEQ ID NO: 4165 - protein, 121 aa, synthetic construct
EVQLVESGGGVVQPGGSLRLSCTASGFTLYDHAVGWFRQAPGKEREGVSVISSSGAHEWYADSVKGRFTISRDISKNTVSLQMNSLRPEDTALYYCAAGGMWYSKEGSEYWGQGTLVTVSS

SEQ ID NO: 4166 - protein, 121 aa, synthetic construct
EVQLVESGGGVVQPGGSLRLSCTASGFTLYDHAVGWFRQAPGKEREGVSVISSSGAHEWYADSVKGRFTISRDISKNTVSLQMNSLRPEDTALYYCAAGGMWYSPEGSEYWGQGTLVTVSS

SEQ ID NO: 4167 - protein, 121 aa, synthetic construct
EVQLVESGGGVVQPGGSLRLSCTASGFTLYDHAFGWFRQAPGKEREGVSVGSSSGAHEWYADSVKGRFTISRDISKNTVSLQMNSLRPEDTALYYCAAGGMWYSGEGSEYWGQGTLVTVSS

SEQ ID NO: 4168 - protein, 121 aa, synthetic construct
EVQLVESGGGVVQPGGSLRLSCTASGFTLYDHAVGWFRQAPGKEREGVSVISSSGAHEWYADSVKGRFTISRDISKNTVSLQMNSLRPEDTALYYCAAGGMWYSREGSEYWGQGTLVTVSS

SEQ ID NO: 4169 - protein, 121 aa, synthetic construct
EVQLVESGGGVVQPGGSLRLSCTASGFTLYDHAVGWFRQAPGKEREGVSVISSSGAHEWYADSVKGRFTISRDISKNTVYLQMNSLRPEDTALYYCAAGGFWYSDEGSEYWGQGTLVTVSS

SEQ ID NO: 4170 - protein, 121 aa, synthetic construct
EVQLVESGGGVVQPGGSLRLSCTASGFTLYDHAVGWFRQAPGKEREGVSVISSSGRHEWYADSVKGRFTISRDISKNTVSLQMNSLRPEDTALYYCAAGGMWYSDEGSEYWGQGTLVTVSS

SEQ ID NO: 4171 - protein, 121 aa, synthetic construct
EVQLVESGGGVVQPGGSLRLSCTASGFTLYDHAVGWFRQAPGKEREGVSVISSSGAHEWYADSVKGRFTISRDISKNTVYLQMNSLRPEDTALYYCAAGGVWYSDAGSEYWGQGTLVTVSS

SEQ ID NO: 4172 - protein, 121 aa, synthetic construct
EVQLVESGGGVVQPGGSLRLSCTASGFTLYDHAVGWFRQAPGKEREGVSVISSSGAHEEYADSVKGRFTISRDISKNTVYLQMNSLRPEDTALYYCAAGGMWYSDSGSEYWGQGTLVTVSS

SEQ ID NO: 4173 - protein, 121 aa, synthetic construct
EVQLVESGGGVVQPGGSLRLSCTPSGFTLYDHAVGWFRQAPGKEREGVSVISSSGAHEWYVDSVKGRFTIFRDISKNTIYLQMNSLRPEDTALYYCAAGGMWYSDDPSEYWGQGTLVTVSS

SEQ ID NO: 4174 - protein, 121 aa, synthetic construct
EVQLVESGGGVVQPGGSLRLSCTASGFTLYDHAVGWFRQAPGKEREGVSVISSSGAHEWYADSVKGRFTISRDISKNTVYLQMNSLRPEDTALYYCAAGGQWYSDSGSEYWGQGTLVTVSS

SEQ ID NO: 4175 - protein, 121 aa, synthetic construct
EVQLVESGGGVVQPGGSLRLSCTASGFTLYDHAVGWFRQAPGKEREGVSVISSSGAHEWYADSVKGRFTISRDISKNTVYLQMNSLRPEDTALYYCAAGGQWYSDAGSEYWGQGTLVTVSS

SEQ ID NO: 4176 - protein, 121 aa, synthetic construct
EVQLVESGGGVVQPGGSLRLSCTASGFTLYDHAVGWFRQAPGKEREGVSVISSSGAHEWYADSVKGRFTISRDISKNTVYLQMNSLRPEDTALYYCAAGGQWYSDEGSEYWGQGTLVTVSS

SEQ ID NO: 4177 - protein, 121 aa, synthetic construct
EVQLVESGGGVVQPGGSLRLSCTASGFTLYDHAVGWFRQAPGKEREGVSVISSSGAHEWYADSVKGRFTISRDISKNTVYLQMNSLRPEDTALYYCAAGGMWYSDVGSEYWGQGTLVTVSS

SEQ ID NO: 4178 - protein, 121 aa, synthetic construct
EVQLVESGGGVVQPGGSLRLSCTASGFTLYDHAVGWFRQAPGKEREGVSVISSSGAHEEYADSVKGRFTISRDISKNTVYLQMNSLRPEDTALYYCAAGGMWYSDVGSEYWGQGTLVTVSS

SEQ ID NO: 4179 - protein, 121 aa, synthetic construct
EVQLVESGGGVVQPGGSLRLSCTASGFTLYDHAVGWFRQAPGKEREGVSVISSSGAHEWYADSVKGRFTISRDISKNTVYLQMNSLRPEDTALYYCAAGGMWYSDSGSEYWGQGTLVTVSS

SEQ ID NO: 4180 - protein, 121 aa, synthetic construct
EVQLVESGGGVVQPGGSLRLSCTASGFTLYDHAVGWFRQAPGKEREGVSVISSSGAHEWYADSVKGRFTISRDISKNTVYLQMNSLRPEDTALYYCAAGGMWYSDAGSEYWGQGTLVTVSS

SEQ ID NO: 4181 - protein, 121 aa, synthetic construct
EVQLVESGGGVVQPGGSLRLSCTASGFTLYDHAVGWFRQAPGKEREGVSVISSSGAHEEYADSVKGRFTISRDISKNTVYLQMNSLRPEDTALYYCAAGGMWYSDAGSEYWGQGTLVTVSS

SEQ ID NO: 4182 - protein, 121 aa, synthetic construct
EVQLVESGGGVVQPGGSLRLSCTPSGFTLYDHAVGWFRQAPGKEREGVSVISSSGAHEWYVDSVKGRFTIFRDISKNTIYLQMNSLRPEDTALYYCAAGGMWYSDDVSEYWGQGTLVTVSS

SEQ ID NO: 4183 - protein, 121 aa, synthetic construct
EVQLVESGGGVVQPGGSLRLSCTASGFTLYDHAVGWFRQAPGKEREGVSVISSSGAHEWYADSVKGRFTISRDISKNTVYLQMNSLRPEDTALYYCAAGGMWYSDEGSEYWGQGTLVTVSS

SEQ ID NO: 4184 - protein, 121 aa, synthetic construct
EVQLVESGGGVVQPGGSLRLSCTASGFTLYDHAVGWFRQAPGKEREGVSVISSSGAHEEYADSVKGRFTISRDISKNTVYLQMNSLRPEDTALYYCAAGGMWYSDEGSEYWGQGTLVTVSS

SEQ ID NO: 4185 - protein, 121 aa, synthetic construct
EVQLVESGGGVVQPGGSLRLSCTASGFTLYDHAVGWFRQAPGKEREGVSVISSSGAHEWYADSVKGRFTISRDISKNTVYLQMNSLRPEDTALYYCAAGGFWYSDVGSEYWGQGTLVTVSS

SEQ ID NO: 4186 - protein, 121 aa, synthetic construct
EVQLVESGGGVVQPGGSLRLSCTASGFTLYDHAVGWFRQAPGKEREGVSVISSSGAHEWYADSVKGRFTISRDISKNTVYLQMNSLRPEDTALYYCAAGGFWYSDSGSEYWGQGTLVTVSS

SEQ ID NO: 4187 - protein, 121 aa, synthetic construct
EVQLVESGGGVVQPGGSLRLSCTASGFTLYDHAVGWFRQAPGKEREGVSVISSSGAHEWYADSVKGRFTISRDISKNTVYLQMNSLRPEDTALYYCAAGGFWYSDAGSEYWGQGTLVTVSS

SEQ ID NO: 4188 - protein, 121 aa, synthetic construct
EVQLVESGGGVVQPGGSLRLSCTASGFTLYDHAVGWFRQAPGKEREGVSVISSSGAHEWYADSVKGRFTISRDISKNTVYLQMNSLRPEDTALYYCAAGGVWYSDSGSEYWGQGTLVTVSS

SEQ ID NO: 4189 - protein, 121 aa, synthetic construct
EVQLVESGGGVVQPGGSLRLSCTASGFTLYDHAVGWFRQAPGKEREGVSVISSSGAHEWYADSVKGRFTISRDISKNTVYLQMNSLRPEDTALYYCAAGGVWYSDVGSEYWGQGTLVTVSS

SEQ ID NO: 4190 - protein, 121 aa, synthetic construct
EVQLVESGGGVVQPGGSLRLSCTASGFTLYDHAVGWFRQAPGKEREGVSVISSSGAHEFYADSVKGRFTISRDISKNTVYLQMNSLRPEDTALYYCAAGGEWYSDEGSEYWGQGTLVTVSS

SEQ ID NO: 4191 - protein, 121 aa, synthetic construct
EVQLVESGGGVVQPGGSLRLSCTPSGFTLYDHAVGWFRQAPGKEREGVSVISSSGAHEWYVDSVKGRFTIFRDISKNTIYLQMNSLRPEDTALYYCAAGGMWYSDDDSEYWGQGTLVTVSS

SEQ ID NO: 4192 - protein, 121 aa, synthetic construct
EVQLVESGGGVVQPGGSLRLSCTASGFTLYDHAVGWFRQAPGKEREGVSVISSSGAHEWYADSVKGRFTISRDISKNTVYLQMNSLRPEDTALYYCAAGGEWYSDEGSEYWGQGTLVTVSS

SEQ ID NO: 4193 - protein, 121 aa, synthetic construct
EVQLVESGGGVVQPGGSLRLSCTASGFTLYDHAVGWFRQAPGKEREGVSVISSSGHHEWYADSVKGRFTISRDISKNTVSLQMNSLRPEDTALYYCAAGGMWYSDEGSEYWGQGTLVTVSS

SEQ ID NO: 4194 - protein, 121 aa, synthetic construct
EVQLVESGGGVVQPGGSLRLSCTASGFTLYDHAVGWFRQAPGKEREGVSVISSSGAHEWYADSVKGRFTISRDISKNTVYLQMNSLRPEDTALYYCAAGGQWYSDVGSEYWGQGTLVTVSS

SEQ ID NO: 4195 - protein, 121 aa, synthetic construct
EVQLVESGGGVVQPGGSLRLSCTASGFTLYDHAVGWFRQAPGKEREGVSVISSSGEHEWYADSVKGRFTISRDISKNTVSLQMNSLRPEDTALYYCAAGGMWYSDEGSEYWGQGTLVTVSS

SEQ ID NO: 4196 - protein, 121 aa, synthetic construct
EVQLVESGGGVVQPGGSLRLSCTASGFTLYDHAFGWFRQAPGKEREGVSVISSSGKHEWYADSVKGRFTISRDISKNTVSLQMNSLRPEDTALYYCAAGGMWYSGEGSEYWGQGTLVTVSS

SEQ ID NO: 4197 - protein, 121 aa, synthetic construct
EVQLVESGGGVVQPGGSLRLSCTASGFTLYDHAVGWFRQAPGKEREGVSVISSSGKHEWYADSVKGRFTISRDISKNTVSLQMNSLRPEDTALYYCAAGGMWYSGEGSEYWGQGTLVTVSS

SEQ ID NO: 4198 - protein, 121 aa, synthetic construct
EVQLVESGGGVVQPGGSLRLSCTASGFTLYDHAFGWFRQAPGKEREGVSVISSSGTHEWYADSVKGRFTISRDISKNTVSLQMNSLRPEDTALYYCAAGGMWYSGEGSEYWGQGTLVTVSS

SEQ ID NO: 4199 - protein, 121 aa, synthetic construct
EVQLVESGGGVVQPGGSLRLSCTASGFTLYDHAVGWFRQAPGKEREGVSVISSSGTHEWYADSVKGRFTISRDISKNTVSLQMNSLRPEDTALYYCAAGGMWYSGEGSEYWGQGTLVTVSS

SEQ ID NO: 4200 - protein, 121 aa, synthetic construct
EVQLVESGGGVVQPGGSLRLSCTASGFTLYDHAFGWFRQAPGKEREGVSVISSSGPHEWYADSVKGRFTISRDISKNTVSLQMNSLRPEDTALYYCAAGGMWYSGEGSEYWGQGTLVTVSS

SEQ ID NO: 4201 - protein, 121 aa, synthetic construct
EVQLVESGGGVVQPGGSLRLSCTASGFTLYDHAVGWFRQAPGKEREGVSVISSSGPHEWYADSVKGRFTISRDISKNTVSLQMNSLRPEDTALYYCAAGGMWYSGEGSEYWGQGTLVTVSS

SEQ ID NO: 4202 - protein, 121 aa, synthetic construct
EVQLVESGGGVVQPGGSLRLSCTASGFTLYDHAFGWFRQAPGKEREGVSVISSSGAHEWYADSVKGRFTISRDISKNTVSLQMNSLRPEDTALYYCAAGGMWYSGEGSEYWGQGTLVTVSS

SEQ ID NO: 4203 - protein, 121 aa, synthetic construct
EVQLVESGGGVVQPGGSLRLSCTASGFTLYDHAVGWFRQAPGKEREGVSVISSSGAHEWYADSVKGRFTISRDISKNTVSLQMNSLRPEDTALYYCAAGGMWYSGEGSEYWGQGTLVTVSS

SEQ ID NO: 4204 - protein, 121 aa, synthetic construct
EVQLVESGGGVVQPGGSLRLSCTASGFTLYDHAFGWFRQAPGKEREGVSVISSSGKHEWYADSVKGRFTISRDISKNTVSLQMNSLRPEDTALYYCAAGGMWYSDEGSEYWGQGTLVTVSS

SEQ ID NO: 4205 - protein, 121 aa, synthetic construct
EVQLVESGGGVVQPGGSLRLSCTASGFTLYDHAVGWFRQAPGKEREGVSVISSSGKHEWYADSVKGRFTISRDISKNTVSLQMNSLRPEDTALYYCAAGGMWYSDEGSEYWGQGTLVTVSS

SEQ ID NO: 4206 - protein, 121 aa, synthetic construct
EVQLVESGGGVVQPGGSLRLSCTASGFTLYDHAFGWFRQAPGKEREGVSVISSSGTHEWYADSVKGRFTISRDISKNTVSLQMNSLRPEDTALYYCAAGGMWYSDEGSEYWGQGTLVTVSS

SEQ ID NO: 4207 - protein, 121 aa, synthetic construct
EVQLVESGGGVVQPGGSLRLSCTASGFTLYDHAVGWFRQAPGKEREGVSVISSSGTHEWYADSVKGRFTISRDISKNTVSLQMNSLRPEDTALYYCAAGGMWYSDEGSEYWGQGTLVTVSS

SEQ ID NO: 4208 - protein, 121 aa, synthetic construct
EVQLVESGGGVVQPGGSLRLSCTASGFTLYDHAFGWFRQAPGKEREGVSVISSSGPHEWYADSVKGRFTISRDISKNTVSLQMNSLRPEDTALYYCAAGGMWYSDEGSEYWGQGTLVTVSS

SEQ ID NO: 4209 - protein, 121 aa, synthetic construct
EVQLVESGGGVVQPGGSLRLSCTASGFTLYDHAVGWFRQAPGKEREGVSVISSSGPHEWYADSVKGRFTISRDISKNTVSLQMNSLRPEDTALYYCAAGGMWYSDEGSEYWGQGTLVTVSS

SEQ ID NO: 4210 - protein, 121 aa, synthetic construct
EVQLVESGGGVVQPGGSLRLSCTASGFTLYDHAFGWFRQAPGKEREGVSVISSSGAHEWYADSVKGRFTISRDISKNTVSLQMNSLRPEDTALYYCAAGGMWYSDEGSEYWGQGTLVTVSS

SEQ ID NO: 4211 - protein, 121 aa, synthetic construct
EVQLVESGGGVVQPGGSLRLSCTASGFTLYDHAVGWFRQAPGKEREGVSVISSSGAHEWYADSVKGRFTISRDISKNTVYLQMNSLRPEDTALYYCAAGGVWYSDEGSEYWGQGTLVTVSS

SEQ ID NO: 4212 - protein, 121 aa, synthetic construct
EVQLVESGGGVVQPGGSLRLSCTPSGFTLYDHAVGWFRQAPGKEREGVSVISSSGAHEWYVDSVKGRFTIFRDISKNTIYLQMNSLRPEDTALYYCAAGGMWYSDDESEYWGQGTLVTVSS

SEQ ID NO: 4213 - protein, 121 aa, synthetic construct
EVQLVESGGGVVQPGGSLRLSCTPSGFTLYDHAVGWFRQAPGKEREGVSVISSSGAHEWYVDSVKGRFTIFRDISKNTIYLQMNSLRPEDTALYYCAAGGMWYSDDSSEYWGQGTLVTVSS

SEQ ID NO: 4214 - protein, 121 aa, synthetic construct
EVQLVESGGGVVQPGGSLRLSCTPSGFTLYDHAVGWFRQAPGKEREGVSVISSSGAHEWYVDSVKGRFTIFRDISKNTIYLQMNSLRPEDTALYYCAAGGMWYSDDQSEYWGQGTLVTVSS

SEQ ID NO: 4215 - protein, 121 aa, synthetic construct
EVQLVESGGGVVQPGGSLRLSCTPSGFTLYRHAVGWFRQAPGKEREGVSVISSSGAHEWYVDSVKGRFTIFRDISKNTIYLQMNSLRPEDTALYYCAAGGMWYSDDGSEYWGQGTLVTVSS

SEQ ID NO: 4216 - protein, 121 aa, synthetic construct
EVQLVESGGGVVQPGGSLRLSCTPSGFTLYTHAVGWFRQAPGKEREGVSVISSSGAHEWYVDSVKGRFTIFRDISKNTIYLQMNSLRPEDTALYYCAAGGMWYSDDGSEYWGQGTLVTVSS

SEQ ID NO: 4217 - protein, 121 aa, synthetic construct
EVQLVESGGGVVQPGGSLRLSCTPSGFTLYIHAVGWFRQAPGKEREGVSVISSSGAHEWYVDSVKGRFTIFRDISKNTIYLQMNSLRPEDTALYYCAAGGMWYSDDGSEYWGQGTLVTVSS

SEQ ID NO: 4218 - protein, 121 aa, synthetic construct
EVQLVESGGGVVQPGGSLRLSCTPSGFTLYQHAVGWFRQAPGKEREGVSVISSSGAHEWYVDSVKGRFTIFRDISKNTIYLQMNSLRPEDTALYYCAAGGMWYSDDGSEYWGQGTLVTVSS

SEQ ID NO: 4219 - protein, 121 aa, synthetic construct
EVQLVESGGGVVQPGGSLRLSCTPSGFTLYFHAVGWFRQAPGKEREGVSVISSSGAHEWYVDSVKGRFTIFRDISKNTIYLQMNSLRPEDTALYYCAAGGMWYSDDGSEYWGQGTLVTVSS

SEQ ID NO: 4220 - protein, 121 aa, synthetic construct
EVQLVESGGGVVQPGGSLRLSCTPSGFTLFDHAVGWFRQAPGKEREGVSVISSSGAHEWYVDSVKGRFTIFRDISKNTIYLQMNSLRPEDTALYYCAAGGMWYSDDGSEYWGQGTLVTVSS

SEQ ID NO: 4221 - protein, 121 aa, synthetic construct
EVQLVESGGGVVQPGGSLRLSCTPSGFTLTDHAVGWFRQAPGKEREGVSVISSSGAHEWYVDSVKGRFTIFRDISKNTIYLQMNSLRPEDTALYYCAAGGMWYSDDGSEYWGQGTLVTVSS

SEQ ID NO: 4222 - protein, 121 aa, synthetic construct
EVQLVESGGGVVQPGGSLRLSCTPSGFTLYDYAVGWFRQAPGKEREGVSVISSSGAHEWYVDSVKGRFTIFRDISKNTIYLQMNSLRPEDTALYYCAAGGMWYSDDGSEYWGQGTLVTVSS

SEQ ID NO: 4223 - protein, 121 aa, synthetic construct
EVQLVESGGGVVQPGGSLRLSCTPSGFTLYHHAVGWFRQAPGKEREGVSVISSSGAHEWYVDSVKGRFTIFRDISKNTIYLQMNSLRPEDTALYYCAAGGMWYSDDGSEYWGQGTLVTVSS

SEQ ID NO: 4224 - protein, 121 aa, synthetic construct
EVQLVESGGGVVQPGGSLRLSCTPSGFTLYSHAVGWFRQAPGKEREGVSVISSSGAHEWYVDSVKGRFTIFRDISKNTIYLQMNSLRPEDTALYYCAAGGMWYSDDGSEYWGQGTLVTVSS

SEQ ID NO: 4225 - protein, 121 aa, synthetic construct
EVQLVESGGGVVQPGGSLRLSCTPSGFTLQDHAVGWFRQAPGKEREGVSVISSSGAHEWYVDSVKGRFTIFRDISKNTIYLQMNSLRPEDTALYYCAAGGMWYSDDGSEYWGQGTLVTVSS

SEQ ID NO: 4226 - protein, 121 aa, synthetic construct
EVQLVESGGGVVQPGGSLRLSCTPSGFTLADHAVGWFRQAPGKEREGVSVISSSGAHEWYVDSVKGRFTIFRDISKNTIYLQMNSLRPEDTALYYCAAGGMWYSDDGSEYWGQGTLVTVSS

SEQ ID NO: 4227 - protein, 121 aa, synthetic construct
EVQLVESGGGVVQPGGSLRLSCTPSGFTLSDHAVGWFRQAPGKEREGVSVISSSGAHEWYVDSVKGRFTIFRDISKNTIYLQMNSLRPEDTALYYCAAGGMWYSDDGSEYWGQGTLVTVSS

SEQ ID NO: 4228 - protein, 121 aa, synthetic construct
EVQLVESGGGVVQPGGSLRLSCTPSGFTLRDHAVGWFRQAPGKEREGVSVISSSGAHEWYVDSVKGRFTIFRDISKNTIYLQMNSLRPEDTALYYCAAGGMWYSDDGSEYWGQGTLVTVSS

SEQ ID NO: 4229 - protein, 121 aa, synthetic construct
EVQLVESGGGVVQPGGSLRLSCTPSGFTLPDHAVGWFRQAPGKEREGVSVISSSGAHEWYVDSVKGRFTIFRDISKNTIYLQMNSLRPEDTALYYCAAGGMWYSDDGSEYWGQGTLVTVSS

SEQ ID NO: 4230 - protein, 121 aa, synthetic construct
EVQLVESGGGVVQPGGSLRLSCTPSGFTLDDHAVCWFRQAPGKEREGVSVISSSGAHEWYVDSVKGRFTIFRDISKNTIYLQMNSLRPEDTALYYCAAGGMWYSDDGSEYWGQGTLVTVSS

SEQ ID NO: 4231 - protein, 121 aa, synthetic construct
EVQLVESGGGVVQPGGSLRLSCTPSGFTLYLHAVGWFRQAPGKEREGVSVISSSGAHEWYVDSVKGRFTIFRDISKNTIYLQMNSLRPEDTALYYCAAGGMWYSDDGSEYWGQGTLVTVSS

SEQ ID NO: 4232 - protein, 121 aa, synthetic construct
EVQLVESGGGVVQPGGSLRLSCTPSGFTLGDHAVGWFRQAPGKEREGVSVISSSGAHEWYVDSVKGRFTIFRDISKNTIYLQMNSLRPEDTALYYCAAGGMWYSDDGSEYWGQGTLVTVSS

SEQ ID NO: 4233 - protein, 121 aa, synthetic construct
EVQLVESGGGVVQPGGSLRLSCTPSGFTLLDHAVGWFRQAPGKEREGVSVISSSGAHEWYVDSVKGRFTIFRDISKNTIYLQMNSLRPEDTALYYCAAGGMWYSDDGSEYWGQGTLVTVSS

SEQ ID NO: 4234 - protein, 121 aa, synthetic construct
EVQLVESGGGVVQPGGSLRLSCTPSGFTLEDHAVGWFRQAPGKEREGVSVISSSGAHEWYVDSVKGRFTIFRDISKNTIYLQMNSLRPEDTALYYCAAGGMWYSDDGSEYWGQGTLVTVSS

SEQ ID NO: 4235 - protein, 121 aa, synthetic construct
EVQLVESGGGVVQPGGSLRLSCTPSGFTLYDHAVGWFRQAPGKEREGVSVISSSGAHEWYVDSVKGRFTIFRDISKNTVYLQMNSLRPEDTALYYCAAGGMWYSDDGSEYWGQGTLVTVSS

SEQ ID NO: 4236 - protein, 121 aa, synthetic construct
EVQLVESGGGVVQPGGSLRLSCTPSGFTLYDGAVGWFRQAPGKEREGVSVISSSGAHEWYVDSVKGRFTIFRDISKNTIYLQMNSLRPEDTALYYCAAGGMWYSDDGSEYWGQGTLVTVSS

SEQ ID NO: 4237 - protein, 121 aa, synthetic construct
EVQLVESGGGVVQPGGSLRLSCTPSGFTLYDRAVGWFRQAPGKEREGVSVISSSGAHEWYVDSVKGRFTIFRDISKNTIYLQMNSLRPEDTALYYCAAGGMWYSDDGSEYWGQGTLVTVSS

SEQ ID NO: 4238 - protein, 121 aa, synthetic construct
EVQLVESGGGVVQPGGSLRLSCTPSGFTLYDDAVGWFRQAPGKEREGVSVISSSGAHEWYVDSVKGRFTIFRDISKNTIYLQMNSLRPEDTALYYCAAGGMWYSDDGSEYWGQGTLVTVSS

SEQ ID NO: 4239 - protein, 121 aa, synthetic construct
EVQLVESGGGVVQPGGSLRLSCTPSGFTLYDEAVGWFRQAPGKEREGVSVISSSGAHEWYVDSVKGRFTIFRDISKNTIYLQMNSLRPEDTALYYCAAGGMWYSDDGSEYWGQGTLVTVSS

SEQ ID NO: 4240 - protein, 121 aa, synthetic construct
EVQLVESGGGVVQPGGSLRLSCTPSGFTLYDVAVGWFRQAPGKEREGVSVISSSGAHEWYVDSVKGRFTIFRDISKNTIYLQMNSLRPEDTALYYCAAGGMWYSDDGSEYWGQGTLVTVSS

SEQ ID NO: 4241 - protein, 121 aa, synthetic construct
EVQLVESGGGVVQPGGSLRLSCTPSGFTLYDPAVGWFRQAPGKEREGVSVISSSGAHEWYVDSVKGRFTIFRDISKNTIYLQMNSLRPEDTALYYCAAGGMWYSDDGSEYWGQGTLVTVSS

SEQ ID NO: 4242 - protein, 121 aa, synthetic construct
EVQLVESGGGVVQPGGSLRLSCTPSGFTLYDQAVGWFRQAPGKEREGVSVISSSGAHEWYVDSVKGRFTIFRDISKNTIYLQMNSLRPEDTALYYCAAGGMWYSDDGSEYWGQGTLVTVSS

SEQ ID NO: 4243 - protein, 121 aa, synthetic construct
EVQLVESGGGVVQPGGSLRLSCTPSGFTLYDSAVGWFRQAPGKEREGVSVISSSGAHEWYVDSVKGRFTIFRDISKNTIYLQMNSLRPEDTALYYCAAGGMWYSDDGSEYWGQGTLVTVSS

SEQ ID NO: 4244 - protein, 121 aa, synthetic construct
EVQLVESGGGVVQPGGSLRLSCTPSGFTLYDAAVGWFRQAPGKEREGVSVISSSGAHEWYVDSVKGRFTIFRDISKNTIYLQMNSLRPEDTALYYCAAGGMWYSDDGSEYWGQGTLVTVSS

SEQ ID NO: 4245 - protein, 121 aa, synthetic construct
EVQLVESGGGVVQPGGSLRLSCTPSGFTLYDKAVGWFRQAPGKEREGVSVISSSGAHEWYVDSVKGRFTIFRDISKNTIYLQMNSLRPEDTALYYCAAGGMWYSDDGSEYWGQGTLVTVSS

SEQ ID NO: 4246 - protein, 121 aa, synthetic construct
EVQLVESGGGVVQPGGSLRLSCTPSGFTLYVHAVGWFRQAPGKEREGVSVISSSGAHEWYVDSVKGRFTIFRDISKNTIYLQMNSLRPEDTALYYCAAGGMWYSDDGSEYWGQGTLVTVSS

SEQ ID NO: 4247 - protein, 121 aa, synthetic construct
EVQLVESGGGVVQPGGSLRLSCTPSGFTLYKHAVGWFRQAPGKEREGVSVISSSGAHEWYVDSVKGRFTIFRDISKNTIYLQMNSLRPEDTALYYCAAGGMWYSDDGSEYWGQGTLVTVSS

SEQ ID NO: 4248 - protein, 121 aa, synthetic construct
EVQLVESGGGVVQPGGSLRLSCTPSGFTLYEHAVGWFRQAPGKEREGVSVISSSGAHEWYVDSVKGRFTIFRDISKNTIYLQMNSLRPEDTALYYCAAGGMWYSDDGSEYWGQGTLVTVSS

SEQ ID NO: 4249 - protein, 121 aa, synthetic construct
EVQLVESGGGVVQPGGSLRLSCTPSGFTLYPHAVGWFRQAPGKEREGVSVISSSGAHEWYVDSVKGRFTIFRDISKNTIYLQMNSLRPEDTALYYCAAGGMWYSDDGSEYWGQGTLVTVSS

SEQ ID NO: 4250 - protein, 121 aa, synthetic construct
EVQLVESGGGVVQPGGSLRLSCTPSGFTLYGHAVGWFRQAPGKEREGVSVISSSGAHEWYVDSVKGRFTIFRDISKNTIYLQMNSLRPEDTALYYCAAGGMWYSDDGSEYWGQGTLVTVSS

SEQ ID NO: 4251 - protein, 121 aa, synthetic construct
EVQLVESGGGVVQPGGSLRLSCTPSGFTLYYHAVGWFRQAPGKEREGVSVISSSGAHEWYVDSVKGRFTIFRDISKNTIYLQMNSLRPEDTALYYCAAGGMWYSDDGSEYWGQGTLVTVSS

SEQ ID NO: 4252 - protein, 121 aa, synthetic construct
EVQLVESGGGVVQPGGSLRLSCTPSGFTLKDHAVGWFRQAPGKEREGVSVISSSGAHEWYVDSVKGRFTIFRDISKNTIYLQMNSLRPEDTALYYCAAGGMWYSDDGSEYWGQGTLVTVSS

SEQ ID NO: 4253 - protein, 121 aa, synthetic construct
EVQLVESGGGVVQPGGSLRLSCTPSGFTLHDHAVGWFRQAPGKEREGVSVISSSGAHEWYVDSVKGRFTIFRDISKNTIYLQMNSLRPEDTALYYCAAGGMWYSDDGSEYWGQGTLVTVSS

SEQ ID NO: 4254 - protein, 121 aa, synthetic construct
EVQLVESGGGVVQPGGSLRLSCTASGFTLYDHAVGWFRQAPGKEREGVSVISSSGAHEWYVDSVKGRFTISRDISKNTIYLQMNSLRPEDTALYYCAAGGMWYSDDGSEYWGQGTLVTVSS

SEQ ID NO: 4255 - protein, 121 aa, synthetic construct
EVQLVESGGGVVQPGGSLRLSCAPSGFTLYDHAVGWFRQAPGKEREGVSVISSSGAHEWYADSVKGRFTISRDNSKNTIYLQMNSLRPEDTALYYCAAGGMWYSDDGSEYWGQGTLVTVSS

SEQ ID NO: 4256 - protein, 121 aa, synthetic construct
EVQLVESGGGVVQPGGSLRLSCAASGFTLYDHAVGWFRQAPGKEREGVSVISSSGAHEWYVDSVKGRFTISRDNSKNTIYLQMNSLRPEDTALYYCAAGGMWYSDDGSEYWGQGTLVTVSS

SEQ ID NO: 4257 - protein, 121 aa, synthetic construct
EVQLVESGGGVVQPGGSLRLSCTPSGFTLYDHAVGWFRQAPGKEREGVSVISSSGAHEWYVDSVKGRFTISRDNSKNTIYLQMNSLRPEDTALYYCAAGGMWYSDDGSEYWGQGTLVTVSS

SEQ ID NO: 4258 - protein, 121 aa, synthetic construct
EVQLVESGGGVVQPGGSLRLSCAASGFTLYDHAVGWFRQAPGKEREGVSVISSSGAHEWYADSVKGRFTISRDNSKNTIYLQMNSLRPEDTALYYCAAGGMWYSDDGSEYWGQGTLVTVSS

SEQ ID NO: 4259 - protein, 121 aa, synthetic construct
EVQLVESGGGVVQPGGSLRLSCTPSGFTLYDHAVGWFRQAPGKEREGVSVISSSGAHEWYADSVKGRFTISRDNSKNTIYLQMNSLRPEDTALYYCAAGGMWYSDDGSEYWGQGTLVTVSS

SEQ ID NO: 4260 - protein, 121 aa, synthetic construct
EVQLVESGGGVVQPGGSLRLSCTASGFTLYDHAVGWFRQAPGKEREGVSVISSSGAHEWYVDSVKGRFTIFRDISKNTIYLQMNSLRPEDTALYYCAAGGMWYSDDGSEYWGQGTLVTVSS

SEQ ID NO: 4261 - protein, 121 aa, synthetic construct
EVQLVESGGGVVQPGGSLRLSCAPSGFTLYDHAVGWFRQAPGKEREGVSVISSSGAHEWYVDSVKGRFTISRDISKNTIYLQMNSLRPEDTALYYCAAGGMWYSDDGSEYWGQGTLVTVSS

SEQ ID NO: 4262 - protein, 121 aa, synthetic construct
EVQLVESGGGVVQPGGSLRLSCAASGFTLYDHAVGWFRQAPGKEREGVSVISSSGAHEWYADSVKGRFTIFRDISKNTIYLQMNSLRPEDTALYYCAAGGMWYSDDGSEYWGQGTLVTVSS

SEQ ID NO: 4263 - protein, 121 aa, synthetic construct
EVQLVESGGGVVQPGGSLRLSCTASGFTLYDHAVGWFRQAPGKEREGVSVISSSGAHEWYADSVKGRFTISRDNSKNTIYLQMNSLRPEDTALYYCAAGGMWYSDDGSEYWGQGTLVTVSS

SEQ ID NO: 4264 - protein, 121 aa, synthetic construct
EVQLVESGGGVVQPGGSLRLSCTPSGFTLYDHAVGWFRQAPGKEREGVSVISSSGAHEWYADSVKGRFTIFRDISKNTIYLQMNSLRPEDTALYYCAAGGMWYSDDGSEYWGQGTLVTVSS

SEQ ID NO: 4265 - protein, 121 aa, synthetic construct
EVQLVESGGGVVQPGGSLRLSCTPSGFTLYDIAVGWFRQAPGKEREGVSVISSSGAHEWYVDSVKGRFTIFRDISKNTIYLQMNSLRPEDTALYYCAAGGMWYSDDGSEYWGQGTLVTVSS

SEQ ID NO: 4266 - protein, 121 aa, synthetic construct
EVQLVESGGGVVQPGGSLRLSCAASGFTLYDHAVGWFRQAPGKEREGVSVISSSGAHEWYVDSVKGRFTIFRDISKNTIYLQMNSLRPEDTALYYCAAGGMWYSDDGSEYWGQGTLVTVSS

SEQ ID NO: 4267 - protein, 121 aa, synthetic construct
EVQLVESGGGVVQPGGSLRLSCTPSGFTLYDHAVGWFRQAPGKEREGVSVISSSGAHEWYVDSVKGRFTIFRDISKNTLYLQMNSLRPEDTALYYCAAGGMWYSDDGSEYWGQGTLVTVSS

SEQ ID NO: 4268 - protein, 121 aa, synthetic construct
EVQLVESGGGVVQPGGSLRLSCTASGFTLYDHAVGWFRQAPGKEREGVSVISSSGAHEWYADSVKGRFTISRDISKNTIYLQMNSLRPEDTALYYCAAGGMWYSDDGSEYWGQGTLVTVSS

SEQ ID NO: 4269 - protein, 121 aa, synthetic construct
EVQLVESGGGVVQPGGSLRLSCTASGFTLYDHAVGWFRQAPGKEREGVSVISSSGAHEWYADSVKGRFTIFRDISKNTIYLQMNSLRPEDTALYYCAAGGMWYSDDGSEYWGQGTLVTVSS

SEQ ID NO: 4270 - protein, 121 aa, synthetic construct
DVQLVESGGGVVQPGGSLRLSCTPSGFTLYDHAVGWFRQAPGKEREGVSVISSSGAHEWYVDSVKGRFTIFRDISKNTIYLQMNSLRPEDTALYYCAAGGMWYSDDASEYWGQGTLVTVSS

SEQ ID NO: 4271 - protein, 121 aa, synthetic construct
DVQLVESGGGVVQPGGSLRLSCTPSGFTLYDHAVGWFRQAPGKEREGVSVISSSGAHEWYVDSVKGRFTIFRDISKNTIYLQMNSLRPEDTALYYCAAGGMWYSADGSEYWGQGTLVTVSS

SEQ ID NO: 4272 - protein, 121 aa, synthetic construct
DVQLVESGGGVVQPGGSLRLSCTPSGFTLYDHAVGWFRQAPGKEREGVSVISSSGAHEWYVDSVKGRFTIFRDNSKNTIYLQMNSLRPEDTALYYCAAGGMWYSDDGSEYWGQGTLVTVSS

SEQ ID NO: 4273 - protein, 121 aa, synthetic construct
EVQLVESGGGVVQPGGSLRLSCTASGFTLYDHAFGWFRQAPGKEREGVSDISSSGAHEWYADSVKGRFTISRDISKNTVSLQMNSLRPEDTALYYCAAGGMWYSGEGSEYWGQGTLVTVSS

SEQ ID NO: 4274 - protein, 121 aa, synthetic construct
EVQLVESGGGVVQPGGSLRLSCTASGFTLYDHAFGWFRQAPGKEREGVSVTSSSGAHEWYADSVKGRFTISRDISKNTVSLQMNSLRPEDTALYYCAAGGMWYSDEGSEYWGQGTLVTVSS

SEQ ID NO: 4275 - protein, 121 aa, synthetic construct
EVQLVESGGGVVQPGGSLRLSCAASGFTLYDHAVGWFRQAPGKEREGVSVISSSGAHEWYADSVKGRFTISRDISKNTIYLQMNSLRPEDTALYYCAAGGMWYSDDGSEYWGQGTLVTVSS

SEQ ID NO: 4276 - protein, 121 aa, synthetic construct
EVQLVESGGGVVQPGGSLRLSCAASGFTLYDHAVGWFRQAPGKEREGVSVISSSGAHEWYVDSVKGRFTISRDISKNTIYLQMNSLRPEDTALYYCAAGGMWYSDDGSEYWGQGTLVTVSS

SEQ ID NO: 4277 - protein, 121 aa, synthetic construct
EVQLVESGGGVVQPGGSLRLSCAPSGFTLYDHAVGWFRQAPGKEREGVSVISSSGAHEWYADSVKGRFTIFRDISKNTIYLQMNSLRPEDTALYYCAAGGMWYSDDGSEYWGQGTLVTVSS

SEQ ID NO: 4278 - protein, 121 aa, synthetic construct
EVQLVESGGGVVQPGGSLRLSCTPSGFTLYDHAVGWFRQAPGKEREGVSVISSSGAHEWYVDSVKGRFTIFRDISKNTIDLQMNSLRPEDTALYYCAAGGMWYSDDGSEYWGQGTLVTVSS

SEQ ID NO: 4279 - protein, 121 aa, synthetic construct
EVQLVESGGGVVQPGGSLRLSCAASGFTLYDHAVGWFRQAPGKEREGVSVISSSGAHEWYVDSVKGRFTIFRDNSKNTIYLQMNSLRPEDTALYYCAAGGMWYSDDGSEYWGQGTLVTVSS

SEQ ID NO: 4280 - protein, 121 aa, synthetic construct
EVQLVESGGGVVQPGGSLRLSCTASGFTLYDHAVGWFRQAPGKEREGVSVISSSGAHEWYADSVKGRFTIFRDNSKNTIYLQMNSLRPEDTALYYCAAGGMWYSDDGSEYWGQGTLVTVSS

SEQ ID NO: 4281 - protein, 121 aa, synthetic construct
EVQLVESGGGVVQPGGSLRLSCAASGFTLYDHAVGWFRQAPGKEREGVSVISSSGAHEWYADSVKGRFTIFRDNSKNTIYLQMNSLRPEDTALYYCAAGGMWYSDDGSEYWGQGTLVTVSS

SEQ ID NO: 4282 - protein, 121 aa, synthetic construct
EVQLVESGGGVVQPGGSLRLSCAPSGFTLYDHAVGWFRQAPGKEREGVSVISSSGAHEWYADSVKGRFTIFRDNSKNTIYLQMNSLRPEDTALYYCAAGGMWYSDDGSEYWGQGTLVTVSS

SEQ ID NO: 4283 - protein, 121 aa, synthetic construct
EVQLVESGGGVVQPGGSLRLSCTPSGFTLYDHAVGWFRQAPGKEREGVSVISSSGAHEWYVDSVKGRFTIFRDNSKNTIYLQMNSLRPEDTALYYCAAGGMWYSDDGSEYWGQGTLVTVSS

SEQ ID NO: 4284 - protein, 121 aa, synthetic construct
EVQLVESGGGVVQPGGSLRLSCAPSGFTLYDHAVGWFRQAPGKEREGVSVISSSGAHEWYVDSVKGRFTIFRDISKNTIYLQMNSLRPEDTALYYCAAGGMWYSDDGSEYWGQGTLVTVSS

SEQ ID NO: 4285 - protein, 121 aa, synthetic construct
EVQLVESGGGVVQPGGSLRLSCTPSGFTLYDHAVGWFRQAPGKEREGVSVISSSGAHEWYVDSVKGRFTIFRDISKNTIYLQMNSLRPEDTALYYCAAGGMWYSDDGSEYWGQGTLVTVSS

SEQ ID NO: 4286 - protein, 121 aa, synthetic construct
EVQLVESGGGVVQPGGSLRLSCAPSGFTLYDHAVGWFRQAPGKEREGVSVISSSGAHEWYVDSVKGRFTIFRDNSKNTIYLQMNSLRPEDTALYYCAAGGMWYSDDGSEYWGQGTLVTVSS

SEQ ID NO: 4287 - protein, 121 aa, synthetic construct
EVQLVESGGGVVQPGGSLRLSCTASGFTLYDHAVGWFRQAPGKEREGVSVISSSGAHEWYVDSVKGRFTIFRDNSKNTIYLQMNSLRPEDTALYYCAAGGMWYSDDGSEYWGQGTLVTVSS

SEQ ID NO: 4288 - protein, 121 aa, synthetic construct
EVQLVESGGGVVQPGGSLRLSCTPSGFTLYDHAVGWFRQAPGKEREGVSVISSSGAHEWYVDSVKGRFTIFRDISKNTISLQMNSLRPEDTALYYCAAGGMWYSDDGSEYWGQGTLVTVSS

SEQ ID NO: 4289 - protein, 121 aa, synthetic construct
EVQLVESGGGVVQPGGSLRLSCTASGFTLYDHAVGWFRQAPGKEREGVSVISSSGAHEWYVDSVKGRFTISRDNSKNTIYLQMNSLRPEDTALYYCAAGGMWYSDDGSEYWGQGTLVTVSS

SEQ ID NO: 4290 - protein, 121 aa, synthetic construct
EVQLVESGGGVVQPGGSLRLSCTPSGFTLYDHAVGWFRQAPGKEREGVSVISSSGAHEWYADSVKGRFTIFRDNSKNTIYLQMNSLRPEDTALYYCAAGGMWYSDDGSEYWGQGTLVTVSS

SEQ ID NO: 4291 - protein, 121 aa, synthetic construct
EVQLVESGGGVVQPGGSLRLSCTPSGFTLYDHAVGWFRQAPGKEREGVSVISSSGAHEWYVDSVKGRFTISRDISKNTIYLQMNSLRPEDTALYYCAAGGMWYSDDGSEYWGQGTLVTVSS

SEQ ID NO: 4292 - protein, 121 aa, synthetic construct
EVQLVESGGGVVQPGGSLRLSCAPSGFTLYDHAVGWFRQAPGKEREGVSVISSSGAHEWYVDSVKGRFTISRDNSKNTIYLQMNSLRPEDTALYYCAAGGMWYSDDGSEYWGQGTLVTVSS

SEQ ID NO: 4293 - protein, 121 aa, synthetic construct
EVQLVESGGGVVQPGGSLRLSCTPSGFTLYDHAVGWFRQAPGKEREGVSVISSSGAHEWYADSVKGRFTISRDISKNTIYLQMNSLRPEDTALYYCAAGGMWYSDDGSEYWGQGTLVTVSS

SEQ ID NO: 4294 - protein, 121 aa, synthetic construct
EVQLVESGGGVVQPGGSLRLSCAPSGFTLYDHAVGWFRQAPGKEREGVSVISSSGAHEWYADSVKGRFTISRDISKNTIYLQMNSLRPEDTALYYCAAGGMWYSDDGSEYWGQGTLVTVSS

SEQ ID NO: 4295 - protein, 121 aa, synthetic construct
EVQLVESGGGVVQPGGSLRLSCTASGFTLYDHAVGWFRQAPGKEREGVSEISSSGAHEWYADSVKGRFTISRDISKNTVSLQMNSLRPEDTALYYCAAGGMWYSGEGSEYWGQGTLVTVSS

SEQ ID NO: 4296 - protein, 121 aa, synthetic construct
EVQLVESGGGVVQPGGSLRLSCTPSGFTLYDFAVGWFRQAPGKEREGVSVISSSGAHEWYVDSVKGRFTIFRDISKNTIYLQMNSLRPEDTALYYCAAGGMWYSDDGSEYWGQGTLVTVSS

SEQ ID NO: 4297 - protein, 121 aa, synthetic construct
EVQLVESGGGVVQPGGSLRLSCTPSGFTLYDHAVGWFRQAPGKEREGVSVISSSGAHEFYVDSVKGRFTIFRDISKNTIYLQMNSLRPEDTALYYCAAGGMWYSDDGSEYWGQGTLVTVSS

SEQ ID NO: 4298 - protein, 121 aa, synthetic construct
EVQLVESGGGVVQPGGSLRLSCTPSGFTLYDHAVGWFRQAPGKEREGVSVISSSGAHEWYVDSVKGRFTIFRDISKNTIYLQMNSLRPEDTALYYCAAGGMTYSDDGSEYWGQGTLVTVSS

SEQ ID NO: 4299 - protein, 121 aa, synthetic construct
EVQLVESGGGVVQPGGSLRLSCTPSGFTLYDHAVGWFRQAPGKEREGVSVISSSGAHEWYVDSVKGRFTIFRDISKNTIYLQMNSLRPEDTALYYCAAGGMSYSDDGSEYWGQGTLVTVSS

SEQ ID NO: 4300 - protein, 121 aa, synthetic construct
EVQLVESGGGVVQPGGSLRLSCTPSGFTLYDHAVGWFRQAPGKEREGVSVISSSGAHEWYVDSVKGRFTIFRDISKNTIYLQMNSLRPEDTALYYCAAGGMPYSDDGSEYWGQGTLVTVSS

SEQ ID NO: 4301 - protein, 121 aa, synthetic construct
EVQLVESGGGVVQPGGSLRLSCTPSGFTLYDHAVGWFRQAPGKEREGVSVISSSGAHEWYVDSVKGRFTIFRDISKNTIYLQMNSLRPEDTALYYCAAGGMFYSDDGSEYWGQGTLVTVSS

SEQ ID NO: 4302 - protein, 121 aa, synthetic construct
EVQLVESGGGVVQPGGSLRLSCTPSGFTLYDHAVGWFRQAPGKEREGVSVISSSGAHEWYVDSVKGRFTIFRDISKNTIYLQMNSLRPEDTALYYCAAGGMVYSDDGSEYWGQGTLVTVSS

SEQ ID NO: 4303 - protein, 121 aa, synthetic construct
EVQLVESGGGVVQPGGSLRLSCTPSGFTLYDHAVGWFRQAPGKEREGVSVISSSGAHEWYVDSVKGRFTIFRDISKNTIYLQMNSLRPEDTALYYCAAGGMIYSDDGSEYWGQGTLVTVSS

SEQ ID NO: 4304 - protein, 121 aa, synthetic construct
EVQLVESGGGVVQPGGSLRLSCTPSGFTLYDHAVGWFRQAPGKEREGVSVISSSGAHEWYVDSVKGRFTIFRDISKNTIYLQMNSLRPEDTALYYCAAGGMRYSDDGSEYWGQGTLVTVSS

SEQ ID NO: 4305 - protein, 121 aa, synthetic construct
EVQLVESGGGVVQPGGSLRLSCTPSGFTLDDHAVGWFRQAPGKEREGVSVISSSGAHEWYVDSVKGRFTIFRDISKNTIYLQMNSLRPEDTALYYCAAGGMWYSDDGSEYWGQGTLVTVSS

SEQ ID NO: 4306 - protein, 121 aa, synthetic construct
EVQLVESGGGVVQPGGSLRLSCTPSGFTLYDHAVGWFRQAPGKEREGVSVISSSGAHEWYVDSVKGRFTIFRDISKNTIYLQMNSLRPEDTALYYCAAGGMLYSDDGSEYWGQGTLVTVSS

SEQ ID NO: 4307 - protein, 121 aa, synthetic construct
EVQLVESGGGVVQPGGSLRLSCTPSGFTLYDHAVGWFRQAPGKEREGVSVISSSGAHEWYVDSVKGRFTIFRDISKNTIYLQMNSLRPEDTALYYCAAGGMQYSDDGSEYWGQGTLVTVSS

SEQ ID NO: 4308 - protein, 121 aa, synthetic construct
EVQLVESGGGVVQPGGSLRLSCTPSGFTLYDHAVGWFRQAPGKEREGVSVISSSGAHEWYVDSVKGRFTIFRDISKNTIYLQMNSLRPEDTALYYCAAGGMEYSDDGSEYWGQGTLVTVSS

SEQ ID NO: 4309 - protein, 121 aa, synthetic construct
EVQLVESGGGVVQPGGSLRLSCTPSGFTLYDHAVGWFRQAPGKEREGVSVISSSGAHEWYVDSVKGRFTIFRDISKNTIYLQMNSLRPEDTALYYCAAGGMKYSDDGSEYWGQGTLVTVSS

SEQ ID NO: 4310 - protein, 121 aa, synthetic construct
EVQLVESGGGVVQPGGSLRLSCTPSGFTLYDHAVGWFRQAPGKEREGVSVISSSGAHEWYVDSVKGRFTIFRDISKNTIYLQMNSLRPEDTALYYCAAGGMGYSDDGSEYWGQGTLVTVSS

SEQ ID NO: 4311 - protein, 121 aa, synthetic construct
EVQLVESGGGVVQPGGSLRLSCTPSGFTLYDHAVGWFRQAPGKEREGVSVISSSGAHEWYVDSVKGRFTIFRDISKNTIYLQMNSLRPEDTALYYCAAGGMDYSDDGSEYWGQGTLVTVSS

SEQ ID NO: 4312 - protein, 121 aa, synthetic construct
EVQLVESGGGVVQPGGSLRLSCTPSGFTLYDHAVGWFRQAPGKEREGVSVISSSGAHEWYVDSVKGRFTIFRDISKNTIYLQMNSLRPEDTALYYCAAGGGWYSDDGSEYWGQGTLVTVSS

SEQ ID NO: 4313 - protein, 121 aa, synthetic construct
EVQLVESGGGVVQPGGSLRLSCTPSGFTLYDHAVGWFRQAPGKEREGVSVISSSGAHEWYVDSVKGRFTIFRDISKNTIYLQMNSLRPEDTALYYCAAGGAWYSDDGSEYWGQGTLVTVSS

SEQ ID NO: 4314 - protein, 121 aa, synthetic construct
EVQLVESGGGVVQPGGSLRLSCTPSGFTLYAHAVGWFRQAPGKEREGVSVISSSGAHEWYVDSVKGRFTIFRDISKNTIYLQMNSLRPEDTALYYCAAGGMWYSDDGSEYWGQGTLVTVSS

SEQ ID NO: 4315 - protein, 121 aa, synthetic construct
EVQLVESGGGVVQPGGSLRLSCTPSGFTLYDHAVGWFRQAPGKEREGVSVISSSGAHEWYVDSVKGRFTIFRDISKNTIYLQMNSLRPEDTALYYCAAGGMWYSDDASEYWGQGTLVTVSS

SEQ ID NO: 4316 - protein, 121 aa, synthetic construct
EVQLVESGGGVVQPGGSLRLSCTPSGFTLYDHAVGWFRQAPGKEREGVSVISSSGAHEWYVDSVKGRFTIFRDISKNTIYLQMNSLRPEDTALYYCAAGGMYYSDDGSEYWGQGTLVTVSS

SEQ ID NO: 4317 - protein, 121 aa, synthetic construct
EVQLVESGGGVVQPGGSLRLSCTPSGFTLYDHAVGWFRQAPGKEREGVSVISSSGAHEWYVDSVKGRFTIFRDISKNTIYLQMNSLRPEDTALYYCAAGGVWYSDDGSEYWGQGTLVTVSS

SEQ ID NO: 4318 - protein, 121 aa, synthetic construct
EVQLVESGGGVVQPGGSLRLSCTPSGFTLYDHAVGWFRQAPGKEREGVSVISSSGAHEWYVDSVKGRFTIFRDISKNTIYLQMNSLRPEDTALYYCAAGGEWYSDDGSEYWGQGTLVTVSS

SEQ ID NO: 4319 - protein, 121 aa, synthetic construct
EVQLVESGGGVVQPGGSLRLSCTPSGFTLYDHAVGWFRQAPGKEREGVSVISSSGAHEWYVDSVKGRFTIFRDISKNTIYLQMNSLRPEDTALYYCAAGGMWYSDIGSEYWGQGTLVTVSS

SEQ ID NO: 4320 - protein, 121 aa, synthetic construct
EVQLVESGGGVVQPGGSLRLSCTPSGFTLYDHAVGWFRQAPGKEREGVSVISSSGAHEWYVDSVKGRFTIFRDISKNTIYLQMNSLRPEDTALYYCAAGGMWYSDHGSEYWGQGTLVTVSS

SEQ ID NO: 4321 - protein, 121 aa, synthetic construct
EVQLVESGGGVVQPGGSLRLSCTPSGFTLYDHAVGWFRQAPGKEREGVSVISSSGAHEWYVDSVKGRFTIFRDISKNTIYLQMNSLRPEDTALYYCAAGGMWYSDYGSEYWGQGTLVTVSS

SEQ ID NO: 4322 - protein, 121 aa, synthetic construct
EVQLVESGGGVVQPGGSLRLSCTPSGFTLYDHAVGWFRQAPGKEREGVSVISSSGAHEWYVDSVKGRFTIFRDISKNTIYLQMNSLRPEDTALYYCAAGGMWYSDVGSEYWGQGTLVTVSS

SEQ ID NO: 4323 - protein, 121 aa, synthetic construct
EVQLVESGGGVVQPGGSLRLSCTPSGFTLYDHAVGWFRQAPGKEREGVSVISSSGAHEWYVDSVKGRFTIFRDISKNTIYLQMNSLRPEDTALYYCAAGGMWYSDAGSEYWGQGTLVTVSS

SEQ ID NO: 4324 - protein, 121 aa, synthetic construct
EVQLVESGGGVVQPGGSLRLSCTPSGFTLYDHAVGWFRQAPGKEREGVSVISSSGAHEWYVDSVKGRFTIFRDISKNTIYLQMNSLRPEDTALYYCAAGGMWYSDLGSEYWGQGTLVTVSS

SEQ ID NO: 4325 - protein, 121 aa, synthetic construct
EVQLVESGGGVVQPGGSLRLSCTPSGFTLYDHAVGWFRQAPGKEREGVSVISSSGAHEWYVDSVKGRFTIFRDISKNTIYLQMNSLRPEDTALYYCAAGGMWYSDGGSEYWGQGTLVTVSS

SEQ ID NO: 4326 - protein, 121 aa, synthetic construct
EVQLVESGGGVVQPGGSLRLSCTPSGFTLYDHAVGWFRQAPGKEREGVSVISSSGAHEWYVDSVKGRFTIFRDISKNTIYLQMNSLRPEDTALYYCAAGGMWYSDPGSEYWGQGTLVTVSS

SEQ ID NO: 4327 - protein, 121 aa, synthetic construct
EVQLVESGGGVVQPGGSLRLSCTPSGFTLYDHAVGWFRQAPGKEREGVSVISSSGAHEWYVDSVKGRFTIFRDISKNTIYLQMNSLRPEDTALYYCAAGGMWYSDKGSEYWGQGTLVTVSS

SEQ ID NO: 4328 - protein, 121 aa, synthetic construct
EVQLVESGGGVVQPGGSLRLSCTPSGFTLYDHAVGWFRQAPGKEREGVSVISSSGAHEWYVDSVKGRFTIFRDISKNTIYLQMNSLRPEDTALYYCAAGGMWYSDQGSEYWGQGTLVTVSS

SEQ ID NO: 4329 - protein, 121 aa, synthetic construct
EVQLVESGGGVVQPGGSLRLSCTPSGFTLYDHAVGWFRQAPGKEREGVSVISSSGAHEWYVDSVKGRFTIFRDISKNTIYLQMNSLRPEDTALYYCAAGGMWYSDRGSEYWGQGTLVTVSS

SEQ ID NO: 4330 - protein, 121 aa, synthetic construct
EVQLVESGGGVVQPGGSLRLSCTPSGFTLYDHAVGWFRQAPGKEREGVSVISSSGAHEWYVDSVKGRFTIFRDISKNTIYLQMNSLRPEDTALYYCAAGGMWYSDTGSEYWGQGTLVTVSS

SEQ ID NO: 4331 - protein, 121 aa, synthetic construct
EVQLVESGGGVVQPGGSLRLSCTPSGFTLYDHAVGWFRQAPGKEREGVSVISSSGAHEWYVDSVKGRFTIFRDISKNTIYLQMNSLRPEDTALYYCAAGGMWYSDVGSEYCGQGTLVTVSS

SEQ ID NO: 4332 - protein, 121 aa, synthetic construct
EVQLVESGGGVVQPGGSLRLSCTPSGFTLYDHAVGWFRQAPGKEREGVSVISSSGAHEWYVDSVKGRFTIFRDISKNTIYLQMNSLRPEDTALYYCAAGGMWYSDFGSEYWGQGTLVTVSS

SEQ ID NO: 4333 - protein, 121 aa, synthetic construct
EVQLVESGGGVVQPGGSLRLSCTPSGFTLYDHAVGWFRQAPGKEREGVSVISSSGAHEWYVDSVKGRFTIFRDISKNTIYLQMNSLRPEDTALYYCAAGGMWYSDEGSEYWGQGTLVTVSS

SEQ ID NO: 4334 - protein, 121 aa, synthetic construct
EVQLVESGGGVVQPGGSLRLSCTPSGFTLYDHAVGWFRQAPGKEREGVSVISSSGAHEWYVDSVKGRFTIFRDISKNTIYLQMNSLRPEDTALYYCAAGGMWYSDSGSEYWGQGTLVTVSS

SEQ ID NO: 4335 - protein, 121 aa, synthetic construct
EVQLVESGGGVVQPGGSLRLSCTPSGFTLYDHAVGWFRQAPGKEREGVSVISSSGAHEWYVDSVKGRFTIFRDISKNTIYLQMNSLRPEDTALYYCAAGGIWYSDDGSEYWGQGTLVTVSS

SEQ ID NO: 4336 - protein, 121 aa, synthetic construct
EVQLVESGGGVVQPGGSLRLSCTPSGFTLYDHAVGWFRQAPGKEREGVSVISSSGAHEWYVDSVKGRFTIFRDISKNTIYLQMNSLRPEDTALYYCAAGGMHYSDDGSEYWGQGTLVTVSS

SEQ ID NO: 4337 - protein, 121 aa, synthetic construct
EVQLVESGGGVVQPGGSLRLSCTPSGFTLYDHAVGWFRQAPGKEREGVSVISSSGAHEWYVDSVKGRFTIFRDISKNTIYLQMNSLRPEDTALYYCAAGGMAYSDDGSEYWGQGTLVTVSS

SEQ ID NO: 4338 - protein, 121 aa, synthetic construct
EVQLVESGGGVVQPGGSLRLSCTPSGFTLYDHAVGWFRQAPGKEREGVSVISSSGAHEWYVDSVKGRFTIFRDISKNTIYLQMNSLRPEDTALYYCAAGGDWYSDDGSEYWGQGTLVTVSS

SEQ ID NO: 4339 - protein, 121 aa, synthetic construct
EVQLVESGGGVVQPGGSLRLSCTPSGFTLYDTAVGWFRQAPGKEREGVSVISSSGAHEWYVDSVKGRFTIFRDISKNTIYLQMNSLRPEDTALYYCAAGGMWYSDDGSEYWGQGTLVTVSS

SEQ ID NO: 4340 - protein, 121 aa, synthetic construct
EVQLVESGGGVVQPGGSLRLSCTPSGFTLYDHAVGWFRQAPGKEREGVSVISSSGAHEDYVDSVKGRFTIFRDISKNTIYLQMNSLRPEDTALYYCAAGGMWYSDDGSEYWGQGTLVTVSS

SEQ ID NO: 4341 - protein, 121 aa, synthetic construct
EVQLVESGGGVVQPGGSLRLSCTPSGFTLYDHAVGWFRQAPGKEREGVSVISSSGAHEEYVDSVKGRFTIFRDISKNTIYLQMNSLRPEDTALYYCAAGGMWYSDDGSEYWGQGTLVTVSS

SEQ ID NO: 4342 - protein, 121 aa, synthetic construct
EVQLVESGGGVVQPGGSLRLSCTPSGFTLYDHAVGWFRQAPGKEREGVSVISSSGAHEHYVDSVKGRFTIFRDISKNTIYLQMNSLRPEDTALYYCAAGGMWYSDDGSEYWGQGTLVTVSS

SEQ ID NO: 4343 - protein, 121 aa, synthetic construct
EVQLVESGGGVVQPGGSLRLSCTPSGFTLYDHAVGWFRQAPGKEREGVSVISSSGAHEYYVDSVKGRFTIFRDISKNTIYLQMNSLRPEDTALYYCAAGGMWYSDDGSEYWGQGTLVTVSS

SEQ ID NO: 4344 - protein, 121 aa, synthetic construct
EVQLVESGGGVVQPGGSLRLSCTPSGFTLYDHAVGWFRQAPGKEREGVSVISSSGAHELYVDSVKGRFTIFRDISKNTIYLQMNSLRPEDTALYYCAAGGMWYSDDGSEYWGQGTLVTVSS

SEQ ID NO: 4345 - protein, 121 aa, synthetic construct
EVQLVESGGGVVQPGGSLRLSCTPSGFTLYDHAVGWFRQAPGKEREGVSVISSSGAHERYVDSVKGRFTIFRDISKNTIYLQMNSLRPEDTALYYCAAGGMWYSDDGSEYWGQGTLVTVSS

SEQ ID NO: 4346 - protein, 121 aa, synthetic construct
EVQLVESGGGVVQPEGSLRLSCTPSGFTLYDHAVGWFRQAPGKEREGVSVISSSGAHEEYVDSVKGRFTIFRDISKNTIYLQMNSLRPEDTALYYCAAGGMWYSDDGSEYWGQGTLVTVSS

SEQ ID NO: 4347 - protein, 121 aa, synthetic construct
EVQLVESGGGVVQPGGSLRLSCTPSGFTLYDHAVGWFRQAPGKEREGVSVISSSGAHEVYVDSVKGRFTIFRDISKNTIYLQMNSLRPEDTALYYCAAGGMWYSDDGSEYWGQGTLVTVSS

SEQ ID NO: 4348 - protein, 121 aa, synthetic construct
EVQLVESGGGVVQPGGSLRLSCTPSGFTLYDHAVGWFRQAPGKEREGVSVISSSGAHEKYVDSVKGRFTIFRDISKNTIYLQMNSLRPEDTALYYCAAGGMWYSDDGSEYWGQGTLVTVSS

SEQ ID NO: 4349 - protein, 121 aa, synthetic construct
EVQLVESGGGVVQPGGSLRLSCTPSGFTLYDHAVGWFRQAPGKEREGVSVISSSGAHEWYVDSVKGRFTIFRDISKNTIYLQMNSLRPEDTALYLCAAGGMWYSDDGSEYWGQGTLVTVSS

SEQ ID NO: 4350 - protein, 121 aa, synthetic construct
EVQLVESGGGVVQPGGSLRLSCTPSGFTLYDHAVGWFRQAPGKEREGVSVISSSGAHEWYVDSVKGRFTIFRDISKNTIYLQMNSLRPEDTALYPCAAGGMWYSDDGSEYWGQGTLVTVSS

SEQ ID NO: 4351 - protein, 121 aa, synthetic construct
EVQLVESGGGVVQPGGSLRLSCTPSGFTLYDHAVGWFRQAPGKEREGVSVISSSGAHEGYVDSVKGRFTIFRDISKNTIYLQMNSLRPEDTALYYCAAGGMWYSDDGSEYWGQGTLVTVSS

SEQ ID NO: 4352 - protein, 121 aa, synthetic construct
EVQLVESGGGVVQPGGSLRLSCTPSGFTLYDHAVGWFRQAPGKEREGVSVISSSGAHESYVDSVKGRFTIFRDISKNTIYLQMNSLRPEDTALYYCAAGGMWYSDDGSEYWGQGTLVTVSS

SEQ ID NO: 4353 - protein, 121 aa, synthetic construct
EVQLVESGGGVVQPGGSLRLSCTPSGFTLYDHAVGWFRQAPGKEREGVSVISSSGAHEAYVDSVKGRFTIFRDISKNTIYLQMNSLRPEDTALYYCAAGGMWYSDDGSEYWGQGTLVTVSS

SEQ ID NO: 4354 - protein, 121 aa, synthetic construct
EVQLVESGGGVVQPGGSLRLSCTPSGFTLYDHAVGWFRQAPGKEREGVSVISSSGAHEPYVDSVKGRFTIFRDISKNTIYLQMNSLRPEDTALYYCAAGGMWYSDDGSEYWGQGTLVTVSS

SEQ ID NO: 4355 - protein, 121 aa, synthetic construct
EVQLVESGGGVVQPGGSLRLSCTPSGFTLYDHAVGWFRQAPGKEREGVSVISSSGAHEIYVDSVKGRFTIFRDISKNTIYLQMNSLRPEDTALYYCAAGGMWYSDDGSEYWGQGTLVTVSS

SEQ ID NO: 4356 - protein, 121 aa, synthetic construct
EVQLVESGGGVVQPGGSLRLSCTPSGFTLYDHAVGWFRQAPGKEREGVSVISSSGAHEWYVDSVKGRFTIFRDISKNTIYLQMNSLRPEDTALYGCAAGGMWYSDDGSEYWGQGTLVTVSS

SEQ ID NO: 4357 - protein, 121 aa, synthetic construct
EVQLVESGGGVVQPGGSLRLSCTPSGFTLYDVAVGWFRQAPGKEREGASVISSSGAHEWYVDSVKGRFTIFRDISKNTIYLQMNSLRPEDTALYYCAAGGMWYSDDGSEYWGQGTLVTVSS

SEQ ID NO: 4358 - protein, 121 aa, synthetic construct
EVQLVESGGGVVQPGGSLRLSCTPSGFTLYDHAVGWFRQAPGKEREGVSVISSSGAHEWYVDSVKGRFTIFRDISKNTIYLQMNSLRPEDTALYDCAAGGMWYSDDGSEYWGQGTLVTVSS

SEQ ID NO: 4359 - protein, 121 aa, synthetic construct
EVQLVESGGGVVQPGGSLRLSCTPSGFTLYDHAVGWFRQAPGKEREGVSVISSSGAHEWYVDSVKGRFTIFRDISKNTIYLQMNSLRPEDTALYSCAAGGMWYSDDGSEYWGQGTLVTVSS

SEQ ID NO: 4360 - protein, 121 aa, synthetic construct
EVQLVESGGGVVQPGGSLRLSCTPSGFTLYDHAVGWFRQAPGKEREGVSVISSSGAHEWYVDSVKGRFTIFRDISKNTIYLQMNSLRPEDTALYYCAAGGYWYSDDGSEYWGQGTLVTVSS

SEQ ID NO: 4361 - protein, 121 aa, synthetic construct
EVQLVESGGGVVQPGGSLRLSCTPSGFTLYDLAVGWFRQAPGKEREGVSVISSSGAHEWYVDSVKGRFTIFRDISKNTIYLQMNSLRPEDTALYYCAAGGMWYSDDGSEYWGQGTLVTVSS

SEQ ID NO: 4362 - protein, 121 aa, synthetic construct
EVQLVESGGGVVQPGGSLRLSCTPSGFTLYDHAVGWFRQAPGKEREGVSVISSSGAHEWYVDSVKGRFTIFRDISKNTIYLQMNSLRPEDTALYYCAAGGRWYSDDGSEYWGQGTLVTVSS

SEQ ID NO: 4363 - protein, 121 aa, synthetic construct
EVQLVESGGGVVQPGGSLRLSCTPSGFTLYDHAVGWFRQAPGKEREGVSVISSSGAHEWYVDSVKGRFTIFRDISKNTIYLQMNSLRPEDTALYICAAGGMWYSDDGSEYWGQGTLVTVSS

SEQ ID NO: 4364 - protein, 121 aa, synthetic construct
EVQLVESGGGVLQPGGSLRLSCTPSGFTLYDHAVGWFRQAPGKEREGVSVISSSGAHEWYVDSVKGRFTIFRDISKNTIYLQMNSLRPEDTALYYCAAGGKWYSDDGSEYWGQGTLVTVSS

SEQ ID NO: 4365 - protein, 121 aa, synthetic construct
EVQLVESGGGVVQPGGSLRLSCTPSGFTLYDHAVGWFRQAPGKEREGVSVISSSGAHEWYVDSVKGRFTIFRDISKNTIYLQMNSLRPEDTALYYCAAGGSWYSDDGSEYWGQGTLVTVSS

SEQ ID NO: 4366 - protein, 121 aa, synthetic construct
EVQLVESGGGVVQPGGSLRLSCTPSGFTLYDHAVGWFRQAPGKEREGVSVISSSGAHEWYVDSVKGRFTIFRDISKNTIYLQMNSLRPEDTALYYCAAGGTWYSDDGSEYWGQGTLVTVSS

SEQ ID NO: 4367 - protein, 121 aa, synthetic construct
EVQLVESGGGVVQPGGSLRLSCTPSGFTLYDHAVGWFRQAPGKEREGVSVISSSGAHEWYVDSVKGRFTIFRDISKNTIYLQMNSLRPEDTALYYCAAGGFWYSDDGSEYWGQGTLVTVSS

SEQ ID NO: 4368 - protein, 121 aa, synthetic construct
EVQLVESGGGVVQPGGSLRLSCTPSGFTLYDHAVGWFRQAPGKEREGVSVISSSGAHEWYVDSVKGRFTIFRDISKNTIYLQMNSLRPEDTALYYCAAGGQWYSDDGSEYWGQGTLVTVSS

SEQ ID NO: 4369 - protein, 121 aa, synthetic construct
EVQLVESGGGVVQPGGSLRLSCTPSGFTLYDHAVGWFRQAPGKEREGVSVISSSGAHEWYVDSVKGRFTIFRDISKNTIYLQMNSLRPEDTALYYCAAGGHWYSDDGSEYWGQGTLVTVSS

SEQ ID NO: 4370 - protein, 121 aa, synthetic construct
EVQLVESGGGVVQPGGSLRLSCTPSGFTLYDHAVGWFRQAPGKEREGVSVISSSGAHEWYVDSVKGRFTIFRDISKNTIYLQMNSLRPEDTALYYCAAGGPWYSDDGSEYWGQGTLVTVSS

SEQ ID NO: 4371 - protein, 121 aa, synthetic construct
EVQLVESGGGVVQPGGSLRLSCTPSGFTLYDHAVGWFRQAPGKEREGVSVISSSGAHEWYVDSVKGRFTIFRDISKNTIYLQMNSLRPEDTALYYCAAGGKWYSDDGSEYWGQGTLVTVSS

SEQ ID NO: 4372 - protein, 121 aa, synthetic construct
EVQLVESGGGVVQPGGSLRLSCTPSGFTLYDHAVGWFRQAPGKEREGVSVISSSGAHEWYVDSVKGRFTIFRDISKNTIYLQMNSLRPEDTALYRCAAGGMWYSDDGSEYWGQGTLVTVSS

SEQ ID NO: 4373 - protein, 121 aa, synthetic construct
EVQLVESGGGVVQPGGSLRLSCTPSGFTLYDHAVGWFRQAPGKEREGVSVISSSGAHEWYVDSVKGRFTIFRDISKNTIYLQMNSLRPEDTALYQCAAGGMWYSDDGSEYWGQGTLVTVSS

SEQ ID NO: 4374 - protein, 121 aa, synthetic construct
EVQLVESGGGVVQPGGSLRLSCTPSGFTLYDHAVGWFRQAPGKEREGVSVISSSGAHEWYVDSVKGRFTIFRDISKNTIYLQMNSLRPEDTALYHCAAGGMWYSDDGSEYWGQGTLVTVSS

SEQ ID NO: 4375 - protein, 121 aa, synthetic construct
EVQLVESGGGVVQPGGSLRLSCTPSGFTLYDHAVGWFRQAPGKEREGVSVISSSGAHEWYVDSVKGRFTIFRDISKNTIYLQMNSLRPEDTALYVCAAGGMWYSDDGSEYWGQGTLVTVSS

SEQ ID NO: 4376 - protein, 121 aa, synthetic construct
EVQLVESGGGVVQPGGSLRLSCTPSGFTLYDHAVGWFRQAPGKEREGVSVISSSGAHEWYVDSVKGRFTIFRDISKNTIYLQMNSLRPEDTALYFCAAGGMWYSDDGSEYWGQGTLVTVSS

SEQ ID NO: 4377 - protein, 121 aa, synthetic construct
EVQLVESGGGVVQPGGSLRLSCTPSGFTLYDHAVGWFRQAPGKEREGVSVISSSGAHEWYVDSVKGRFTIFRDISKNTIYLQMNSLRPEDTALYACAAGGMWYSDDGSEYWGQGTLVTVSS

SEQ ID NO: 4378 - protein, 121 aa, synthetic construct
DVQLVESGGGVVQPGGSLRLSCTASGFTLYDHAFGWFRQAPGKEREGVSVISSSGAHEWYADSVKGRFTISRDISKNTVSLQMNSLRPEDTALYYCAAGGMWYSDEGSEYWGQGTLVTVSS

SEQ ID NO: 4379 - protein, 25 aa, synthetic construct
DVQLVESGGGVVQPGGSLRLSCTAS

SEQ ID NO: 4380 - protein, 25 aa, synthetic construct
DVQLVESGGGVVQPGGSLRLSCTPS

SEQ ID NO: 4381 - protein, 25 aa, synthetic construct
EVQLVESGGGLVQPGGSLRLSCTPS

SEQ ID NO: 4382 - protein, 25 aa, synthetic construct
EVQLVESGGGVLQPGGSLRLSCTPS

SEQ ID NO: 4383 - protein, 25 aa, synthetic construct
EVQLVESGGGVVQPEGSLRLSCTPS

SEQ ID NO: 4384 - protein, 25 aa, synthetic construct
EVQLVESGGGVVQPGGSLRLSCAAS

SEQ ID NO: 4385 - protein, 25 aa, synthetic construct
EVQLVESGGGVVQPGGSLRLSCAPS

SEQ ID NO: 4386 - protein, 25 aa, synthetic construct
EVQLVESGGGVVQPGGSLRLSCTAS

SEQ ID NO: 4387 - protein, 25 aa, synthetic construct
EVQLVESGGGVVQPGGSLRLSCTPS

SEQ ID NO: 4388 - protein, 10 aa, synthetic construct
GFTLADHAVG

SEQ ID NO: 4389 - protein, 10 aa, synthetic construct
GFTLDDHAVC

SEQ ID NO: 4390 - protein, 10 aa, synthetic construct
GFTLDDHAVG

SEQ ID NO: 4391 - protein, 10 aa, synthetic construct
GFTLEDHAVG

SEQ ID NO: 4392 - protein, 10 aa, synthetic construct
GFTLFDHAVG

SEQ ID NO: 4393 - protein, 10 aa, synthetic construct
GFTLGDHAVG

SEQ ID NO: 4394 - protein, 10 aa, synthetic construct
GFTLHDHAVG

SEQ ID NO: 4395 - protein, 10 aa, synthetic construct
GFTLKDHAVG

SEQ ID NO: 4396 - protein, 10 aa, synthetic construct
GFTLLDHAVG

SEQ ID NO: 4397 - protein, 10 aa, synthetic construct
GFTLPDHAVG

SEQ ID NO: 4398 - protein, 10 aa, synthetic construct
GFTLQDHAVG

SEQ ID NO: 4399 - protein, 10 aa, synthetic construct
GFTLRDHAVG

SEQ ID NO: 4400 - protein, 10 aa, synthetic construct
GFTLSDHAVG

SEQ ID NO: 4401 - protein, 10 aa, synthetic construct
GFTLTDHAVG

SEQ ID NO: 4402 - protein, 10 aa, synthetic construct
GFTLYAHAVG

SEQ ID NO: 4403 - protein, 10 aa, synthetic construct
GFTLYDAAVG

SEQ ID NO: 4404 - protein, 10 aa, synthetic construct
GFTLYDDAVG

SEQ ID NO: 4405 - protein, 10 aa, synthetic construct
GFTLYDEAVG

SEQ ID NO: 4406 - protein, 10 aa, synthetic construct
GFTLYDFAVG

SEQ ID NO: 4407 - protein, 10 aa, synthetic construct
GFTLYDGAVG

SEQ ID NO: 4408 - protein, 10 aa, synthetic construct
GFTLYDHAFG

SEQ ID NO: 4409 - protein, 10 aa, synthetic construct
GFTLYDHAVA

SEQ ID NO: 4410 - protein, 10 aa, synthetic construct
GFTLYDHAVD

SEQ ID NO: 4411 - protein, 10 aa, synthetic construct
GFTLYDHAVE

SEQ ID NO: 4412 - protein, 10 aa, synthetic construct
GFTLYDHAVG

SEQ ID NO: 4413 - protein, 10 aa, synthetic construct
GFTLYDHAVH

SEQ ID NO: 4414 - protein, 10 aa, synthetic construct
GFTLYDHAVI

SEQ ID NO: 4415 - protein, 10 aa, synthetic construct
GFTLYDHAVK

SEQ ID NO: 4416 - protein, 10 aa, synthetic construct
GFTLYDHAVP

SEQ ID NO: 4417 - protein, 10 aa, synthetic construct
GFTLYDHAVQ

SEQ ID NO: 4418 - protein, 10 aa, synthetic construct
GFTLYDHAVR

SEQ ID NO: 4419 - protein, 10 aa, synthetic construct
GFTLYDHAVS

SEQ ID NO: 4420 - protein, 10 aa, synthetic construct
GFTLYDHAVT

SEQ ID NO: 4421 - protein, 10 aa, synthetic construct
GFTLYDHAVV

SEQ ID NO: 4422 - protein, 10 aa, synthetic construct
GFTLYDHAVY

SEQ ID NO: 4423 - protein, 10 aa, synthetic construct
GFTLYDHDVG

SEQ ID NO: 4424 - protein, 10 aa, synthetic construct
GFTLYDHFVG

SEQ ID NO: 4425 - protein, 10 aa, synthetic construct
GFTLYDHGVG

SEQ ID NO: 4426 - protein, 10 aa, synthetic construct
GFTLYDHHVG

SEQ ID NO: 4427 - protein, 10 aa, synthetic construct
GFTLYDHIVG

SEQ ID NO: 4428 - protein, 10 aa, synthetic construct
GFTLYDHKVG

SEQ ID NO: 4429 - protein, 10 aa, synthetic construct
GFTLYDHLVG

SEQ ID NO: 4430 - protein, 10 aa, synthetic construct
GFTLYDHPVG

SEQ ID NO: 4431 - protein, 10 aa, synthetic construct
GFTLYDHQVG

SEQ ID NO: 4432 - protein, 10 aa, synthetic construct
GFTLYDHRVG

SEQ ID NO: 4433 - protein, 10 aa, synthetic construct
GFTLYDHSVG

SEQ ID NO: 4434 - protein, 10 aa, synthetic construct
GFTLYDHTVG

SEQ ID NO: 4435 - protein, 10 aa, synthetic construct
GFTLYDHVVG

SEQ ID NO: 4436 - protein, 10 aa, synthetic construct
GFTLYDHYVG

SEQ ID NO: 4437 - protein, 10 aa, synthetic construct
GFTLYDIAVG

SEQ ID NO: 4438 - protein, 10 aa, synthetic construct
GFTLYDKAVG

SEQ ID NO: 4439 - protein, 10 aa, synthetic construct
GFTLYDLAVG

SEQ ID NO: 4440 - protein, 10 aa, synthetic construct
GFTLYDPAVG

SEQ ID NO: 4441 - protein, 10 aa, synthetic construct
GFTLYDQAVG

SEQ ID NO: 4442 - protein, 10 aa, synthetic construct
GFTLYDRAVG

SEQ ID NO: 4443 - protein, 10 aa, synthetic construct
GFTLYDSAVG

SEQ ID NO: 4444 - protein, 10 aa, synthetic construct
GFTLYDTAVG

SEQ ID NO: 4445 - protein, 10 aa, synthetic construct
GFTLYDVAVG

SEQ ID NO: 4446 - protein, 10 aa, synthetic construct
GFTLYDYAVG

SEQ ID NO: 4447 - protein, 10 aa, synthetic construct
GFTLYEHAVG

SEQ ID NO: 4448 - protein, 10 aa, synthetic construct
GFTLYFHAVG

SEQ ID NO: 4449 - protein, 10 aa, synthetic construct
GFTLYGHAVG

SEQ ID NO: 4450 - protein, 10 aa, synthetic construct
GFTLYHHAVG

SEQ ID NO: 4451 - protein, 10 aa, synthetic construct
GFTLYIHAVG

SEQ ID NO: 4452 - protein, 10 aa, synthetic construct
GFTLYKHAVG

SEQ ID NO: 4453 - protein, 10 aa, synthetic construct
GFTLYLHAVG

SEQ ID NO: 4454 - protein, 10 aa, synthetic construct
GFTLYPHAVG

SEQ ID NO: 4455 - protein, 10 aa, synthetic construct
GFTLYQHAVG

SEQ ID NO: 4456 - protein, 10 aa, synthetic construct
GFTLYRHAVG

SEQ ID NO: 4457 - protein, 10 aa, synthetic construct
GFTLYSHAVG

SEQ ID NO: 4458 - protein, 10 aa, synthetic construct
GFTLYTHAVG

SEQ ID NO: 4459 - protein, 10 aa, synthetic construct
GFTLYVHAVG

SEQ ID NO: 4460 - protein, 10 aa, synthetic construct
GFTLYYHAVG

SEQ ID NO: 4461 - protein, 14 aa, synthetic construct
WFRQAPGKEREGAS

SEQ ID NO: 4462 - protein, 14 aa, synthetic construct
WFRQAPGKEREGVS

SEQ ID NO: 4463 - protein, 10 aa, synthetic construct
DISSSGAHEW

SEQ ID NO: 4464 - protein, 10 aa, synthetic construct
EISSSGAHEW

SEQ ID NO: 4465 - protein, 10 aa, synthetic construct
EISSSGAHEW

SEQ ID NO: 4466 - protein, 10 aa, synthetic construct
VGSSSGAHEW

SEQ ID NO: 4467 - protein, 10 aa, synthetic construct
VHSSSGAHEW

SEQ ID NO: 4468 - protein, 10 aa, synthetic construct
VHSSSGAHEW

SEQ ID NO: 4469 - protein, 10 aa, synthetic construct
VISSSGAHEA

SEQ ID NO: 4470 - protein, 10 aa, synthetic construct
VISSSGAHEE

SEQ ID NO: 4471 - protein, 10 aa, synthetic construct
VISSSGAHEF

SEQ ID NO: 4472 - protein, 10 aa, synthetic construct
VISSSGAHEF

SEQ ID NO: 4473 - protein, 10 aa, synthetic construct
VISSSGAHEG

SEQ ID NO: 4474 - protein, 10 aa, synthetic construct
VISSSGAHEH

SEQ ID NO: 4475 - protein, 10 aa, synthetic construct
VISSSGAHEI

SEQ ID NO: 4476 - protein, 10 aa, synthetic construct
VISSSGAHEK

SEQ ID NO: 4477 - protein, 10 aa, synthetic construct
VISSSGAHEP

SEQ ID NO: 4478 - protein, 39 aa, synthetic construct
YADSVKGRFTIFRDISKNTIYLQMNSLRPEDTALYYCAA

SEQ ID NO: 4479 - protein, 10 aa, synthetic construct
VISSSGAHER

SEQ ID NO: 4480 - protein, 10 aa, synthetic construct
VISSSGAHES

SEQ ID NO: 4481 - protein, 10 aa, synthetic construct
VISSSGAHEW

SEQ ID NO: 4482 - protein, 10 aa, synthetic construct
VISSSGAHEW

SEQ ID NO: 4483 - protein, 10 aa, synthetic construct
VISSSGAHEY

SEQ ID NO: 4484 - protein, 10 aa, synthetic construct
VISSSGEHEW

SEQ ID NO: 4485 - protein, 10 aa, synthetic construct
VISSSGKHEW

SEQ ID NO: 4486 - protein, 10 aa, synthetic construct
VISSSGPHEW

SEQ ID NO: 4487 - protein, 10 aa, synthetic construct
VISSSGPHEW

SEQ ID NO: 4488 - protein, 10 aa, synthetic construct
VISSSGTHEW

SEQ ID NO: 4489 - protein, 10 aa, synthetic construct
VKSSSGAHEW

SEQ ID NO: 4490 - protein, 10 aa, synthetic construct
VPSSSGAHEW

SEQ ID NO: 4491 - protein, 10 aa, synthetic construct
VRSSSGAHEW

SEQ ID NO: 4492 - protein, 10 aa, synthetic construct
VSSSSGAHEW

SEQ ID NO: 4493 - protein, 10 aa, synthetic construct
VTSSSGAHEW

SEQ ID NO: 4494 - protein, 39 aa, synthetic construct
YADSVKGRFTIFRDNSKNTIYLQMNSLRPEDTALYYCAA

SEQ ID NO: 4495 - protein, 39 aa, synthetic construct
YADSVKGRFTISRDISKNTIYLQMNSLRPEDTALYYCAA

SEQ ID NO: 4496 - protein, 39 aa, synthetic construct
YADSVKGRFTISRDISKNTVSLQMNSLRPEDTALYYCAA

SEQ ID NO: 4497 - protein, 39 aa, synthetic construct
YADSVKGRFTISRDISKNTVYLQMNSLRPEDTALYYCAA

SEQ ID NO: 4498 - protein, 39 aa, synthetic construct
YADSVKGRFTISRDNSKNTIYLQMNSLRPEDTALYYCAA

SEQ ID NO: 4499 - protein, 39 aa, synthetic construct
YADSVKGRFTISRDNSKNTVYLQMNSLRPEDTALYYCAA

SEQ ID NO: 4500 - protein, 39 aa, synthetic construct
YVDSVKGRFTIFRDISKNTIDLQMNSLRPEDTALYYCAA

SEQ ID NO: 4501 - protein, 39 aa, synthetic construct
YVDSVKGRFTIFRDISKNTISLQMNSLRPEDTALYYCAA

SEQ ID NO: 4502 - protein, 39 aa, synthetic construct
YVDSVKGRFTIFRDISKNTIYLQMNSLKPEDTAVYYCAA

SEQ ID NO: 4503 - protein, 39 aa, synthetic construct
YVDSVKGRFTIFRDISKNTIYLQMNSLRPEDTALYACAA

SEQ ID NO: 4504 - protein, 39 aa, synthetic construct
YVDSVKGRFTIFRDISKNTIYLQMNSLRPEDTALYDCAA

SEQ ID NO: 4505 - protein, 39 aa, synthetic construct
YVDSVKGRFTIFRDISKNTIYLQMNSLRPEDTALYFCAA

SEQ ID NO: 4506 - protein, 39 aa, synthetic construct
YVDSVKGRFTIFRDISKNTIYLQMNSLRPEDTALYGCAA

SEQ ID NO: 4507 - protein, 39 aa, synthetic construct
YVDSVKGRFTIFRDISKNTIYLQMNSLRPEDTALYHCAA

SEQ ID NO: 4508 - protein, 39 aa, synthetic construct
YVDSVKGRFTIFRDISKNTIYLQMNSLRPEDTALYICAA

SEQ ID NO: 4509 - protein, 39 aa, synthetic construct
YVDSVKGRFTIFRDISKNTIYLQMNSLRPEDTALYKCAA

SEQ ID NO: 4510 - protein, 39 aa, synthetic construct
YVDSVKGRFTIFRDISKNTIYLQMNSLRPEDTALYLCAA

SEQ ID NO: 4511 - protein, 39 aa, synthetic construct
YVDSVKGRFTIFRDISKNTIYLQMNSLRPEDTALYPCAA

SEQ ID NO: 4512 - protein, 39 aa, synthetic construct
YVDSVKGRFTIFRDISKNTIYLQMNSLRPEDTALYQCAA

SEQ ID NO: 4513 - protein, 39 aa, synthetic construct
YVDSVKGRFTIFRDISKNTIYLQMNSLRPEDTALYRCAA

SEQ ID NO: 4514 - protein, 39 aa, synthetic construct
YVDSVKGRFTIFRDISKNTIYLQMNSLRPEDTALYSCAA

SEQ ID NO: 4515 - protein, 39 aa, synthetic construct
YVDSVKGRFTIFRDISKNTIYLQMNSLRPEDTALYTCAA

SEQ ID NO: 4516 - protein, 39 aa, synthetic construct
YVDSVKGRFTIFRDISKNTIYLQMNSLRPEDTALYVCAA

SEQ ID NO: 4517 - protein, 39 aa, synthetic construct
YVDSVKGRFTIFRDISKNTIYLQMNSLRPEDTALYYCAA

SEQ ID NO: 4518 - protein, 39 aa, synthetic construct
YVDSVKGRFTIFRDISKNTLYLQMNSLRPEDTALYYCAA

SEQ ID NO: 4519 - protein, 39 aa, synthetic construct
YVDSVKGRFTIFRDISKNTVYLQMNSLRPEDTALYYCAA

SEQ ID NO: 4520 - protein, 39 aa, synthetic construct
YVDSVKGRFTIFRDNSKNTIYLQMNSLRPEDTALYYCAA

SEQ ID NO: 4521 - protein, 39 aa, synthetic construct
YVDSVKGRFTISRDISKNTIYLQMNSLRPEDTALYYCAA

SEQ ID NO: 4522 - protein, 12 aa, synthetic construct
GGAWYSDDGSEY

SEQ ID NO: 4523 - protein, 12 aa, synthetic construct
GGDWYSDDGSEY

SEQ ID NO: 4524 - protein, 12 aa, synthetic construct
GGEWYSDAGSEY

SEQ ID NO: 4525 - protein, 12 aa, synthetic construct
GGEWYSDDGSEY

SEQ ID NO: 4526 - protein, 12 aa, synthetic construct
GGEWYSDEGSEY

SEQ ID NO: 4527 - protein, 12 aa, synthetic construct
GGEWYSDSGSEY

SEQ ID NO: 4528 - protein, 12 aa, synthetic construct
GGEWYSDVGSEY

SEQ ID NO: 4529 - protein, 12 aa, synthetic construct
GGFWYSDAGSEY

SEQ ID NO: 4530 - protein, 12 aa, synthetic construct
GGFWYSDDGSEY

SEQ ID NO: 4531 - protein, 12 aa, synthetic construct
GGFWYSDEGSEY

SEQ ID NO: 4532 - protein, 12 aa, synthetic construct
GGFWYSDSGSEY

SEQ ID NO: 4533 - protein, 12 aa, synthetic construct
GGFWYSDVGSEY

SEQ ID NO: 4534 - protein, 12 aa, synthetic construct
GGGWYSDDGSEY

SEQ ID NO: 4535 - protein, 12 aa, synthetic construct
GGHWYSDDGSEY

SEQ ID NO: 4536 - protein, 12 aa, synthetic construct
GGIWYSDDGSEY

SEQ ID NO: 4537 - protein, 12 aa, synthetic construct
GGKWYSDDGSEY

SEQ ID NO: 4538 - protein, 12 aa, synthetic construct
GGMAYSDDGSEY

SEQ ID NO: 4539 - protein, 12 aa, synthetic construct
GGMDYSDDGSEY

SEQ ID NO: 4540 - protein, 12 aa, synthetic construct
GGMEYSDDGSEY

SEQ ID NO: 4541 - protein, 12 aa, synthetic construct
GGMFYSDDGSEY

SEQ ID NO: 4542 - protein, 12 aa, synthetic construct
GGMGYSDDGSEY

SEQ ID NO: 4543 - protein, 12 aa, synthetic construct
GGMHYSDDGSEY

SEQ ID NO: 4544 - protein, 12 aa, synthetic construct
GGMIYSDDGSEY

SEQ ID NO: 4545 - protein, 12 aa, synthetic construct
GGMKYSDDGSEY

SEQ ID NO: 4546 - protein, 12 aa, synthetic construct
GGMLYSDDGSEY

SEQ ID NO: 4547 - protein, 12 aa, synthetic construct
GGMLYSDDPSEY

SEQ ID NO: 4548 - protein, 12 aa, synthetic construct
GGMPYSDDGSEY

SEQ ID NO: 4549 - protein, 12 aa, synthetic construct
GGMQYSDDGSEY

SEQ ID NO: 4550 - protein, 12 aa, synthetic construct
GGMRYSDDGSEY

SEQ ID NO: 4551 - protein, 12 aa, synthetic construct
GGMSYSDDGSEY

SEQ ID NO: 4552 - protein, 12 aa, synthetic construct
GGMTYSDDGSEY

SEQ ID NO: 4553 - protein, 12 aa, synthetic construct
GGMVYSDDGSEY

SEQ ID NO: 4554 - protein, 12 aa, synthetic construct
GGMWYSADGSEY

SEQ ID NO: 4555 - protein, 12 aa, synthetic construct
GGMWYSDAGSEY

SEQ ID NO: 4556 - protein, 12 aa, synthetic construct
GGMWYSDDASEY

SEQ ID NO: 4557 - protein, 12 aa, synthetic construct
GGMWYSDDDSEY

SEQ ID NO: 4558 - protein, 12 aa, synthetic construct
GGMWYSDDESEY

SEQ ID NO: 4559 - protein, 12 aa, synthetic construct
GGMWYSDDFSEY

SEQ ID NO: 4560 - protein, 12 aa, synthetic construct
GGMWYSDDGSEY

SEQ ID NO: 4561 - protein, 12 aa, synthetic construct
GGMWYSDDHSEY

SEQ ID NO: 4562 - protein, 12 aa, synthetic construct
GGMWYSDDISEY

SEQ ID NO: 4563 - protein, 12 aa, synthetic construct
GGMWYSDDKSEY

SEQ ID NO: 4564 - protein, 12 aa, synthetic construct
GGMWYSDDLSEY

SEQ ID NO: 4565 - protein, 12 aa, synthetic construct
GGMWYSDDPSEY

SEQ ID NO: 4566 - protein, 12 aa, synthetic construct
GGMWYSDDQSEY

SEQ ID NO: 4567 - protein, 12 aa, synthetic construct
GGMWYSDDRSEY

SEQ ID NO: 4568 - protein, 12 aa, synthetic construct
GGMWYSDDSSEY

SEQ ID NO: 4569 - protein, 12 aa, synthetic construct
GGMWYSDDTSEY

SEQ ID NO: 4570 - protein, 12 aa, synthetic construct
GGMWYSDDVSEY

SEQ ID NO: 4571 - protein, 12 aa, synthetic construct
GGMWYSDDYSEY

SEQ ID NO: 4572 - protein, 12 aa, synthetic construct
GGMWYSDEGSEY

SEQ ID NO: 4573 - protein, 12 aa, synthetic construct
GGMWYSDFGSEY

SEQ ID NO: 4574 - protein, 12 aa, synthetic construct
GGMWYSDGGSEY

SEQ ID NO: 4575 - protein, 12 aa, synthetic construct
GGMWYSDHGSEY

SEQ ID NO: 4576 - protein, 12 aa, synthetic construct
GGMWYSDIGSEY

SEQ ID NO: 4577 - protein, 12 aa, synthetic construct
GGMWYSDKGSEY

SEQ ID NO: 4578 - protein, 12 aa, synthetic construct
GGMWYSDLGSEY

SEQ ID NO: 4579 - protein, 12 aa, synthetic construct
GGMWYSDPGSEY

SEQ ID NO: 4580 - protein, 12 aa, synthetic construct
GGMWYSDQGSEY

SEQ ID NO: 4581 - protein, 12 aa, synthetic construct
GGMWYSDRGSEY

SEQ ID NO: 4582 - protein, 12 aa, synthetic construct
GGMWYSDSGSEY

SEQ ID NO: 4583 - protein, 12 aa, synthetic construct
GGMWYSDTGSEY

SEQ ID NO: 4584 - protein, 12 aa, synthetic construct
GGMWYSDVGSEY

SEQ ID NO: 4585 - protein, 12 aa, synthetic construct
GGMWYSDYGSEY

SEQ ID NO: 4586 - protein, 12 aa, synthetic construct
GGMWYSGEGSEY

SEQ ID NO: 4587 - protein, 12 aa, synthetic construct
GGMWYSHEGSEY

SEQ ID NO: 4588 - protein, 12 aa, synthetic construct
GGMWYSKEGSEY

SEQ ID NO: 4589 - protein, 12 aa, synthetic construct
GGMWYSPEGSEY

SEQ ID NO: 4590 - protein, 12 aa, synthetic construct
GGMWYSREGSEY

SEQ ID NO: 4591 - protein, 12 aa, synthetic construct
GGMYYSDDGSEY

SEQ ID NO: 4592 - protein, 12 aa, synthetic construct
GGPWYSDDGSEY

SEQ ID NO: 4593 - protein, 12 aa, synthetic construct
GGQWYSDAGSEY

SEQ ID NO: 4594 - protein, 12 aa, synthetic construct
GGQWYSDDGSEY

SEQ ID NO: 4595 - protein, 12 aa, synthetic construct
GGQWYSDEGSEY

SEQ ID NO: 4596 - protein, 12 aa, synthetic construct
GGQWYSDSGSEY

SEQ ID NO: 4597 - protein, 12 aa, synthetic construct
GGQWYSDVGSEY

SEQ ID NO: 4598 - protein, 12 aa, synthetic construct
GGRWYSDDGSEY

SEQ ID NO: 4599 - protein, 12 aa, synthetic construct
GGSWYSDDGSEY

SEQ ID NO: 4600 - protein, 12 aa, synthetic construct
GGTWYSDDGSEY

SEQ ID NO: 4601 - protein, 12 aa, synthetic construct
GGVWYSDAGSEY

SEQ ID NO: 4602 - protein, 12 aa, synthetic construct
GGVWYSDDGSEY

SEQ ID NO: 4603 - protein, 12 aa, synthetic construct
GGVWYSDEGSEY

SEQ ID NO: 4604 - protein, 12 aa, synthetic construct
GGVWYSDSGSEY

SEQ ID NO: 4605 - protein, 12 aa, synthetic construct
GGVWYSDVGSEY

SEQ ID NO: 4606 - protein, 12 aa, synthetic construct
GGYWYSDDGSEY

SEQ ID NO: 4607 - protein, 12 aa, synthetic construct
GRMWYSDDSSEY

SEQ ID NO: 4608 - protein, 10 aa, synthetic construct
  VARIANT 1: note = G can be replaced by T, D, F, S, R, E, H, I, A, V, or K
  VARIANT 2: note = R can be replaced by M, D, H, Y, F, V, L, Q, K, P, A, I, or G
  VARIANT 3: note = M can be replaced by F, R, S, I, D, V, K, T, Y, A, E, or G
  VARIANT 4: note = H can be replaced by R, S, E, P, G, Q, K, A, D, T, V, I, F, Y, or L
  VARIANT 5: note = S can be replaced by T, K, G, I, Y, H, F, D, E, V, P, or L
  VARIANT 6: note = I can be replaced by V, S, K, E, D, Q, R, P, G, T, L, or F
  VARIANT 7: note = N can be replaced by G, V, E, L, l, Y, Q, T, F, P, or H
  VARIANT 8: note = A can be replaced by D, E, I, H, S, V, L, K, G, T, or Y
GRMHSINAMA

SEQ ID NO: 4609 - protein, 10 aa, synthetic construct
  VARIANT 1: note = L can be replaced by V, I, T, F, E, Q, D, R, G, S, A, P, H, or K
  VARIANT 2: note = I can be replaced by G, Y, A, Q, H, T, L, S, D, R, K, or P
  VARIANT 3: note = S can be replaced by G, L, V, K, F, I, T, E, A, D, H, P, Q, or R
  VARIANT 4: note = W can be replaced by L, K, S, Q, V, D, L, H, T, E, I, A, R, P, Y, G, or F
  VARIANT 5: note = G can be replaced by L, T, Y, R, V, P, Q, F, A, or S
  VARIANT 6: note = N can be replaced by D, H, T, A, F, E, S, V, Q, I, L, R, Y, G
  VARIANT 7: note = G can be replaced by Q, F, S, I, H, R, E, V, P, L, D, T, or A
  VARIANT 8: note = I can be replaced by Q, T, L, P, V, Y, H, D, R, E, A, G, F, S, or K
  VARIANT 9: note = T can be replaced by L, D, Q, I, S, G, F, E, A, Y, P, V, or K
  VARIANT 10: note = Y can be replaced by P, R, T, G, A, S, Q, D, E, L, K, I, F, V, or H
  VARIANT 10: note = Y can be replaced by P, R, T, G, A, S, Q, D, E, L, K, I, F, V, or H
LISWGNGITY

SEQ ID NO: 4610 - protein, 10 aa, synthetic construct
  VARIANT 1: note = E can be replaced by P, D, A, K, I, Y, H, R, F, S, T, V, G, or Q
  VARIANT 2: note = S can be replaced by F, A, Y, E, I, D, K, G, R, P, Q, T, H, or L
  VARIANT 3: note = Y can be replaced by D, F, E, R, K, I, T, A, Q, S, V, H, G, or P
  VARIANT 4: note = G can be replaced by L, I, H, S, V, R, P, E, A, K, Y, T, F, A, D, H, or R
  VARIANT 5: note = S can be replaced by D, K, Y, A, L, I, P, V, Q, E, R, T, G, or F
  VARIANT 6: note = S can be replaced by T, K, P,H, I, G, V, Q, R, D, L, or E
  VARIANT 7: note = W can be replaced by C, P, K, Y, V, F, A, I, T, L, H, G, Q, R, D, or E
  VARIANT 8: note = Y can be replaced by F, Q, P, K, T, R, D, I, E, L, H, V, A, G, or S
  VARIANT 9: note = D can be replaced by N, A, S, L, K, T, F, I, G, Y, R, V, E, or H
  VARIANT 10: note = S can be replaced by D, V, H, A, L, E, T, Y, K, F, I, Q, R, G, or P
ESYGSSWYDS

SEQ ID NO: 4611 - protein, 10 aa, synthetic construct
  VARIANT 9: note = V can be replaced by F
GFTLYDHAVG

SEQ ID NO: 4612 - protein, 12 aa, synthetic construct
  VARIANT 8: note = D can be replaced by E
GGMWYSDDGSEY

SEQ ID NO: 4613 - protein, 6 aa, synthetic construct
  VARIANT 6: note = A can be replaced by G, V, L, I
  VARIANT 6: note = A residue can be repeated one to ten times
VTVSSA

SEQ ID NO: 4614 - protein, 5 aa, synthetic construct
VKVSS

SEQ ID NO: 4615 - protein, 5 aa, synthetic construct
VQVSS

SEQ ID NO: 4616 - protein, 5 aa, synthetic construct
VTVKS

SEQ ID NO: 4617 - protein, 5 aa, synthetic construct
VTVQS

SEQ ID NO: 4618 - protein, 5 aa, synthetic construct
VKVKS

SEQ ID NO: 4619 - protein, 5 aa, synthetic construct
VKVQS

SEQ ID NO: 4620 - protein, 5 aa, synthetic construct
VQVKS

SEQ ID NO: 4621 - protein, 5 aa, synthetic construct
VQVQS

SEQ ID NO: 4622 - protein, 6 aa, synthetic construct
VTVSSA

SEQ ID NO: 4623 - protein, 6 aa, synthetic construct
VKVSSA

SEQ ID NO: 4624 - protein, 6 aa, synthetic construct
VQVSSA

SEQ ID NO: 4625 - protein, 6 aa, synthetic construct
VTVKSA

SEQ ID NO: 4626 - protein, 6 aa, synthetic construct
VTVQSA

SEQ ID NO: 4627 - protein, 6 aa, synthetic construct
VKVKSA

SEQ ID NO: 4628 - protein, 6 aa, synthetic construct
VKVQSA

SEQ ID NO: 4629 - protein, 6 aa, synthetic construct
VQVKSA

SEQ ID NO: 4630 - protein, 6 aa, synthetic construct
VQVQSA

SEQ ID NO: 4631 - protein, 387 aa, synthetic construct
DVQLVESGGGLVQSGGSLRLSCAATGFTLDYYVIGWFRQAPGKEREGVACLSSNGDRINYADSVKGRFTISRDIAKNTVYLQMNSLKPEDTAVYHCAAGTSTTVRDMCGIMYLYDYWAQGTLVTVSSGGGGSGGGSEVQLVESGGGLVQSGGSLRLSCAATGFTLDYYVIGWFRQAPGKEREGVACLSSNGDRINYADSVKGRFTISRDIAKNTVYLQMNSLKPEDTAVYHCAAGTSTTVRDMCGIMYLYDYWAQGTLVTVSSGGGGSGGGSEVQLVESGGGVVQPGGSLRLSCAASGFTFRSFGMSWVRQAPGKGPEWVSSISGSGSDTLYADSVKGRFTISRDNSKNTLYLQMNSLRPEDTALYYCTIGGSLSRSSQGTLVTVSS

SEQ ID NO: 4632 - protein, 387 aa, synthetic construct
DVQLVESGGGVVQPGGSLRLSCAASGFTFRSFGMSWVRQAPGKGPEWVSSISGSGSDTLYADSVKGRFTISRDNSKNTLYLQMNSLRPEDTALYYCTIGGSLSRSSQGTLVTVSSGGGGSGGGSEVQLVESGGGLVQSGGSLRLSCAATGFTLDYYVIGWFRQAPGKEREGVACLSSNGDRINYADSVKGRFTISRDIAKNTVYLQMNSLKPEDTAVYHCAAGTSTTVRDMCGIMYLYDYWAQGTLVTVSSGGGGSGGGSEVQLVESGGGLVQSGGSLRLSCAATGFTLDYYVIGWFRQAPGKEREGVACLSSNGDRINYADSVKGRFTISRDIAKNTVYLQMNSLKPEDTAVYHCAAGTSTTVRDMCGIMYLYDYWAQGTLVTVSS

SEQ ID NO: 4633 - protein, 387 aa, synthetic construct
DVQLVESGGGLVQSGGSLRLSCAATGFTLDYYVIGWFRQAPGKEREGVACLSSNGDRINYADSVKGRFTISRDIAKNTVYLQMNSLKPEDTAVYHCAAGTSTTVRDMCGIMYLYDYWAQGTLVTVSSGGGGSGGGSEVQLVESGGGVVQPGGSLRLSCAASGFTFRSFGMSWVRQAPGKGPEWVSSISGSGSDTLYADSVKGRFTISRDNSKNTLYLQMNSLRPEDTALYYCTIGGSLSRSSQGTLVTVSSGGGGSGGGSEVQLVESGGGLVQSGGSLRLSCAATGFTLDYYVIGWFRQAPGKEREGVACLSSNGDRINYADSVKGRFTISRDIAKNTVYLQMNSLKPEDTAVYHCAAGTSTTVRDMCGIMYLYDYWAQGTLVTVSS

SEQ ID NO: 4634 - protein, 263 aa, synthetic construct
DVQLVESGGGLVQSGGSLRLSCAATGFTLDYYVIGWFRQAPGKEREGVACLSSNGDRINYADSVKGRFTISRDIAKNTVYLQMNSLKPEDTAVYHCAAGTSTTVRDMCGIMYLYDYWAQGTLVTVSSGGGGSGGGSEVQLVESGGGLVQSGGSLRLSCAATGFTLDYYVIGWFRQAPGKEREGVACLSSNGDRINYADSVKGRFTISRDIAKNTVYLQMNSLKPEDTAVYHCAAGTSTTVRDMCGIMYLYDYWAQGTLVTVSS

SEQ ID NO: 4635 - protein, 371 aa, synthetic construct
DVQLVESGGGLVQTGGSLRLSCAASGRMHSINAMAWFRQVPGKEREFVALISWGNGITYYEDSMKGRFTISRDNAKNTMYLQMNSLKPEDTARYFCAAESYGSSWYDSWGQGTLVTVSSGGGGSGGGSEVQLVESGGGLVQTGGSLRLSCAASGRMHSINAMAWFRQVPGKEREFVALISWGNGITYYEDSMKGRFTISRDNAKNTMYLQMNSLKPEDTARYFCAAESYGSSWYDSWGQGTLVTVSSGGGGSGGGSEVQLVESGGGVVQPGGSLRLSCAASGFTFRSFGMSWVRQAPGKGPEWVSSISGSGSDTLYADSVKGRFTISRDNSKNTLYLQMNSLRPEDTALYYCTIGGSLSRSSQGTLVTVSS

SEQ ID NO: 4636 - protein, 247 aa, synthetic construct
DVQLVESGGGLVQTGGSLRLSCAASGRMHSINAMAWFRQVPGKEREFVALISWGNGITYYEDSMKGRFTISRDNAKNTMYLQMNSLKPEDTARYFCAAESYGSSWYDSWGQGTLVTVSSGGGGSGGGSEVQLVESGGGLVQTGGSLRLSCAASGRMHSINAMAWFRQVPGKEREFVALISWGNGITYYEDSMKGRFTISRDNAKNTMYLQMNSLKPEDTARYFCAAESYGSSWYDSWGQGTLVTVSS

SEQ ID NO: 4637 - protein, 385 aa, synthetic construct
DVQLVESGGGLVQLGGSLRLSCAAPGDTFSENDIGWFRQTPGKEREFVAAIVWPGGETYYRDSVKGRFTLSRDNAKNTVYLQMNNLKPEDTANYSCAVKIFSKTGTYSASWEYDFWGQGTLVTVSSGGGGSGGGSEVQLVESGGGLVQLGGSLRLSCAAPGDTFSENDIGWFRQTPGKEREFVAAIVWPGGETYYRDSVKGRFTLSRDNAKNTVYLQMNNLKPEDTANYSCAVKIFSKTGTYSASWEYDFWGQGTLVTVSSGGGGSGGGSEVQLVESGGGVVQPGGSLRLSCAASGFTFRSFGMSWVRQAPGKGPEWVSSISGSGSDTLYADSVKGRFTISRDNSKNTLYLQMNSLRPEDTALYYCTIGGSLSRSSQGTLVTVSS

SEQ ID NO: 4638 - protein, 261 aa, synthetic construct
DVQLVESGGGLVQLGGSLRLSCAAPGDTFSENDIGWFRQTPGKEREFVAAIVWPGGETYYRDSVKGRFTLSRDNAKNTVYLQMNNLKPEDTANYSCAVKIFSKTGTYSASWEYDFWGQGTLVTVSSGGGGSGGGSEVQLVESGGGLVQLGGSLRLSCAAPGDTFSENDIGWFRQTPGKEREFVAAIVWPGGETYYRDSVKGRFTLSRDNAKNTVYLQMNNLKPEDTANYSCAVKIFSKTGTYSASWEYDFWGQGTLVTVSS

SEQ ID NO: 4639 - protein, 375 aa, synthetic construct
DVQLVESGGGLVQPGGSLRLSCTPSGFTLYDHAVGWFRQAPGKEREGVSVISSSGAHEWYVDSVKGRFTIFRDISKNTIYLQMNSLKPEDTAVYYCAAGGMWYSDDGSEYWGQGTLVTVSSGGGGSGGGSEVQLVESGGGLVQPGGSLRLSCTPSGFTLYDHAVGWFRQAPGKEREGVSVISSSGAHEWYVDSVKGRFTIFRDISKNTIYLQMNSLKPEDTAVYYCAAGGMWYSDDGSEYWGQGTLVTVSSGGGGSGGGSEVQLVESGGGVVQPGGSLRLSCAASGFTFRSFGMSWVRQAPGKGPEWVSSISGSGSDTLYADSVKGRFTISRDNSKNTLYLQMNSLRPEDTALYYCTIGGSLSRSSQGTLVTVSS

SEQ ID NO: 4640 - protein, 251 aa, synthetic construct
DVQLVESGGGLVQPGGSLRLSCTPSGFTLYDHAVGWFRQAPGKEREGVSVISSSGAHEWYVDSVKGRFTIFRDISKNTIYLQMNSLKPEDTAVYYCAAGGMWYSDDGSEYWGQGTLVTVSSGGGGSGGGSEVQLVESGGGLVQPGGSLRLSCTPSGFTLYDHAVGWFRQAPGKEREGVSVISSSGAHEWYVDSVKGRFTIFRDISKNTIYLQMNSLKPEDTAVYYCAAGGMWYSDDGSEYWGQGTLVTVSS

SEQ ID NO: 4641 - protein, 413 aa, synthetic construct
DVQLVESGGGLVQSGGSLRLSCAATGFTLDYYVIGWFRQAPGKEREGVACLSSNGDRINYADSVKGRFTISRDIAKNTVYLQMNSLKPEDTAVYHCAAGTSTTVRDMCGIMYLYDYWAQGTLVTVSSGGGGSGGGGSGGGGSGGGGSGGGGSGGGGSGGGGSEVQLVESGGGLVQSGGSLRLSCAATGFTLDYYVIGWFRQAPGKEREGVACLSSNGDRINYADSVKGRFTISRDIAKNTVYLQMNSLKPEDTAVYHCAAGTSTTVRDMCGIMYLYDYWAQGTLVTVSSGGGGSGGGSEVQLVESGGGVVQPGGSLRLSCAASGFTFRSFGMSWVRQAPGKGPEWVSSISGSGSDTLYADSVKGRFTISRDNSKNTLYLQMNSLRPEDTALYYCTIGGSLSRSSQGTLVTVSS

SEQ ID NO: 4642 - protein, 389 aa, synthetic construct
DVQLVESGGGLVQSGGSLRLSCAATGFTLDYYVIGWFRQAPGKEREGVACLSSNGDRINYADSVKGRFTISRDIAKNTVYLQMNSLKPEDTAVYHCAAGTSTTVRDMCGIMYLYDYWAQGTLVTVSSGGGGSGGGSEVQLVESGGGLVQSGGSLRLSCAATGFTLDYYVIGWFRQAPGKEREGVACLSSNGDRINYADSVKGRFTISRDIAKNTVYLQMNSLKPEDTAVYHCAAGTSTTVRDMCGIMYLYDYWAQGTLVTVSSGGGGSGGGSEVQLVESGGGVVQPGGSLRLSCAASGLTFSTNPMYWYRQAPGKQRELVASISSRGITNYADSVKGRFTISRDNSKNTVYLQMNSLRPEDTALYYCRLASLSSGTVYWGQGTLVTVSS

SEQ ID NO: 4643 - protein, 377 aa, synthetic construct
DVQLVESGGGVVQPGGSLRLSCAASGLTFSTNPMYWYRQAPGKQRELVASISSRGITNYADSVKGRFTISRDNSKNTVYLQMNSLRPEDTALYYCRLASLSSGTVYWGQGTLVTVSSGGGGSGGGSEVQLVESGGGLVQSGGSLRLSCAATGFTLDYYVIGWFRQAPGKEREGVACLSSNGDRINYADSVKGRFTISRDIAKNTVYLQMNSLKPEDTAVYHCAAGTSTTVRDMCGIMYLYDYWAQGTLVTVSSGGGGSGGGSEVQLVESGGGVVQPGGSLRLSCAASGFTFRSFGMSWVRQAPGKGPEWVSSISGSGSDTLYADSVKGRFTISRDNSKNTLYLQMNSLRPEDTALYYCTIGGSLSRSSQGTLVTVSS

SEQ ID NO: 4644 - protein, 377 aa, synthetic construct
DVQLVESGGGLVQSGGSLRLSCAATGFTLDYYVIGWFRQAPGKEREGVACLSSNGDRINYADSVKGRFTISRDIAKNTVYLQMNSLKPEDTAVYHCAAGTSTTVRDMCGIMYLYDYWAQGTLVTVSSGGGGSGGGSEVQLVESGGGVVQPGGSLRLSCAASGLTFSTNPMYWYRQAPGKQRELVASISSRGITNYADSVKGRFTISRDNSKNTVYLQMNSLRPEDTALYYCRLASLSSGTVYWGQGTLVTVSSGGGGSGGGSEVQLVESGGGVVQPGGSLRLSCAASGFTFRSFGMSWVRQAPGKGPEWVSSISGSGSDTLYADSVKGRFTISRDNSKNTLYLQMNSLRPEDTALYYCTIGGSLSRSSQGTLVTVSS

SEQ ID NO: 4645-4690 - skipped (46 entries)

SEQ ID NO: 4691 - protein, 10 aa, synthetic construct
  VARIANT 1: note = G can be replaced by K, F, A, Y, T, V, H, R, S, P, I, E, L, or D
  VARIANT 2: note = D can be replaced by Y, R, E, T, L, K, H, V, S, P, Q, I, G, A, or F
  VARIANT 3: note = T can be replaced by I, A, E, H, G, P, F, L, K, Q, V, R, Y, or S
  VARIANT 4: note = F can be replaced by K, D, L, T, I, A, E, V, G, H, Y, Q, S, or R
  VARIANT 5: note = S can be replaced by  I, E, A, F, R, V, Y, L, T, Q, K , D, G, or H
  VARIANT 6: note = I can be replaced by E, Q, V, T, S, F, K, P, I, G, R, L, H, or A
  VARIANT 7: note = N can be replaced by R, Q, V, E, Y, H, A,K, L, P, G, F, I, S, E, or D
  VARIANT 8: note = D can be replaced by P, A, T, I, R, V, G, Y, L, F, K, S, I, H, or  E
  VARIANT 9: note = I can be replaced by R, H, M, G, Y, Q, E, K, F, T,S, A, D, or P
  VARIANT 10: note = G can be replaced by A, L, S, R, H, V, P, Q, E, I, D, Y, T, or K
GDTFSINDIG

SEQ ID NO: 4692 - protein, 10 aa, synthetic construct
  VARIANT 1: note = A can be replaced by G, P, F, V, I, R, Q, H, T, S, Y, K, or L
  VARIANT 2: note = I can be replaced by  K, G, L, P, F, A, V, T, E, Y, S, Q, D, or R
  VARIANT 3: note = V can be replaced by K, Y, F, G, Q, A, T, S, P, I, R, D, or L
  VARIANT 4: note = W can be replaced by P, Y, Q, G, T, D, H, R, K, S, L, I, V, F, or A
  VARIANT 5: note = P can be replaced by K, Y, F, G, I, L, T, Q, H, E, D, A, S, or V
  VARIANT 6: note = G can be replaced by Q, E, P, L, F, K, I, S, A, D, R, H, or V
  VARIANT 7: note = G can be replaced by A, H, F, L, Y, T, P, Q, K, I, R, D, V, or S
  VARIANT 8: note = E can be replaced by T, I, R, H, Q, D, K, S, P, A, F, Y, V, G, or L
  VARIANT 9: note = T can be replaced by E, L, Y, F, P, Q, I, R, S, D, K, A, V, or H
  VARIANT 10: note = Y can be replaced by G, I, L, E, D, H, K, A, F, S, R, P, T, Q
AIVWPGGETY

SEQ ID NO: 4693 - protein, 17 aa, synthetic construct
  VARIANT 1: note = K can be replaced by R, L, Y, T, I, Q, A, F, P, D, H, V, S, or E
  VARIANT 2: note = I can be replaced by H, T, E, Q, S, L, K, D, G, Y, V, F, R, A, or P
  VARIANT 3: note = F can be replaced by E, K, A, R, Q, H, T, D, V, L, G, I, Y, or S
  VARIANT 4: note = S can be replaced by D, G, F, L, K, I, P, Y, V, A, or T
  VARIANT 5: note = K can be replaced by T, R, P, Y, S, E, I, L, H, D, F, V, A, or G
  VARIANT 6: note = T can be replaced by K, A, F, S, G, D, P, H, I, Q, Y, L, or V
  VARIANT 7: note = G can be replaced by F, H Y, I, L, T, E, P, R, S, Q, D, K, or A
  VARIANT 8: note = T can be replaced by E, G, V, S, Q, L, H, R, P, A, F, K, I, or Y
  VARIANT 9: note = Y can be replaced by I, A, Q, G, E, F, D, K, L, S, T, R, or V
  VARIANT 10: note = S can be replaced by T, G, L, Q, A, I, K, E, H, D, V, R, P, F, or Y
  VARIANT 11: note = A can be replaced by H, Y, V, R, F, G, L, D, E,T, I, K, P, or S
  VARIANT 12: note = S can be replaced by T, I, D, H, V, R, P, L, K, G, Y, V, E, F, or A
  VARIANT 13: note = W can be replaced by Q, F, H, D, S, K, I, T, E, G, R, L, Y, or A
  VARIANT 14: note = E can be replaced by R, P, I, T, A, F, D, S, H, V, K, L, G, Y, or Q
  VARIANT 15: note = Y can be replaced by Q, L, G, V, P, K, E, I, R, H, D, or F
  VARIANT 16: note = D can be replaced by L, E, F, P, R, T, I, S, Y, G, A, V, K, or H
  VARIANT 17: note = F can be replaced by S, T, Y, K, R, A, H, G, I, V, D, Q, P, E, or L
KIFSKTGTYSASWEYDF

SEQ ID NO: 4694 - protein, 10 aa, synthetic construct
  VARIANT 1: note = G can be replaced by K, F, A, Y, T, V, H, R, S, P, I, E, L, or D
  VARIANT 8: note = D can be replaced by P, A, T, I, R, V, G, Y, L, F, K, S, I, H, or E
  VARIANT 9: note = I can be replaced by R, H, M, G, Y, Q, E, K, F, T, S, A, D, or P
  VARIANT 10: note = G can be replaced by A, L, S, R, H, V, P, Q, E, I, D, Y, T, or K
GDTFSENDIG

SEQ ID NO: 4695 - protein, 17 aa, synthetic construct
  VARIANT 1: note = K can be replaced by R, L, Y, T, I, Q, A, F, P, D, H, V, S, or E
  VARIANT 4: note = S can be replaced by D, G, F, L, K, I, P, Y, V, A, or T
  VARIANT 6: note = T can be replaced by K, A, F, S, G, D, P, H, I, Q, Y, L, or V
  VARIANT 7: note = G can be replaced by F, H, Y, I, L, T, E, P, R, S, Q, D, K, or A
  VARIANT 8: note = T can be replaced by E, G, V, S, Q, L, H, R, P, A, F, K, I, or Y
  VARIANT 9: note = Y can be replaced by I, A, Q, G, E, F, D, K, L, S, T, R, or V
  VARIANT 10: note = S can be replaced by T, G, L, Q, A, I, K, E, H, D, V, R, P, F, or Y
  VARIANT 11: note = A can be replaced by H, Y, V, R, F, G, L, D, E, T, I, K, P, or S
  VARIANT 12: note = S can be replaced by T, I, D, H, V, R, P, L, K, G, Y, V, E, F, or A
  VARIANT 14: note = E can be replaced by R, P, I, T, A, F, D, S, H, V, K, L, G, Y, or Q
  VARIANT 15: note = Y can be replaced by Q, L, G, V, P, K, E, I, R, H, D, or F
  VARIANT 17: note = F can be replaced by S, T, Y, K, R, A, H, G, I, V, D, Q, P, E, or L
KIFSKTGTYSASWEYDF

SEQ ID NO: 4696 - protein, 10 aa, synthetic construct
  VARIANT 5: note = Y can be replaced by F, T, Q, A, S, R, P, D, G, L, E, K, H, or D
  VARIANT 6: note = D can be replaced by R, T, I, Q, F, H, S, L, V, K, E, P, G, A, or Y
  VARIANT 7: note = H can be replaced by G, Y, R, D, E, V, P, Q, S, A, K, I, F, T, or L
  VARIANT 8: note = A can be replaced by L, S, D, R, K, H, Q, T, V, Y, P, I, F, or G
  VARIANT 9: note = V can be replaced by F
  VARIANT 10: note = G can be replaced by Q, E, H, K, P, Y, D, I, T, A, S, R, V, or C
GFTLYDHAVG

SEQ ID NO: 4697 - protein, 10 aa, synthetic construct
  VARIANT 1: note = V can be replaced by E, or D
  VARIANT 2: note = I can be replaced by P, T, S, R, G, H, or K
  VARIANT 7: note = A can be replaced by R, H, E, K, T, or P
  VARIANT 10: note = W can be replaced by F, E, P, D, H, Y, L, R, V, K, G, S, A, or I
VISSSGAHEW

SEQ ID NO: 4698 - protein, 12 aa, synthetic construct
  VARIANT 2: note = G can be replaced by R
  VARIANT 3: note = M can be replaced by E, Q, F, V, G, A, I, D, Y, R, K, S, T, H, or P
  VARIANT 4: note = W can be replaced by L, T, S, P, F, V, I, R, L, Q, E, K, G, D, Y, H, or A
  VARIANT 7: note = D can be replaced by G, H, K, P, R, or A
  VARIANT 8: note = D can be replaced by A, V, S, E, I, H, Y, L, G, P, K, Q, R, T, or F
  VARIANT 9: note = G can be replaced by F, S, H, Y, I, R, K, L, T, P, V, D, E, Q, or A
GGMWYSDDGSEY

SEQ ID NO: 4699 - protein, 10 aa, synthetic construct
  VARIANT 1: note = G can be replaced by T, D, F, S, R, E, H, I, A, V, or K
  VARIANT 2: note = R can be replaced by M, D, H, Y, F, V, L, Q, K, P, A, I, or G
  VARIANT 3: note = M can be replaced by F, R, S, I, D, V, K, T, Y, A, E, or G
  VARIANT 4: note = H can be replaced by R, S, E, P, G, Q, K, A, D, T, V, I, F, Y, or L
  VARIANT 5: note = S can be replaced by T, K, G, I, Y, H, F, D, E, V, P, or L
  VARIANT 6: note = I can be replaced by V, S, K, E, D, Q, R, P, G, T, L, or F
GRMHSINAMA

SEQ ID NO: 4700 - protein, 10 aa, synthetic construct
  VARIANT 2: note = I can be replaced by G, Y, A, Q, H, T, L, S, D, R, K, or P
  VARIANT 4: note = W can be replaced by L, K, S, Q, V, D, L, H, T, E, I, A, R, P, Y, G, or F
  VARIANT 5: note = G can be replaced by L, T, Y, R, V, P, Q, F, A, or S
  VARIANT 7: note = G can be replaced by Q, F, S, I, H, R, E, V, P, L, D, T, or A
LISWGNGITY

SEQ ID NO: 4701 - protein, 10 aa, synthetic construct
  VARIANT 2: note = S can be replaced by F, A, Y, E, I, D, K, G, R,P, Q, T, H, or L
  VARIANT 4: note = G can be replaced by L, I, H, S, V, R, P, E, A, K, Y, T, F, A, D, H, or R
  VARIANT 9: note = D can be replaced by N, A, S, L, K, T, F, I, G, Y, R, V, E, H, or absent
  VARIANT 10: note = S can be replaced by D, V, H, A, L, E, T, Y, K, F, I, Q, R, G, P, or absent
ESYGSSWYDS

SEQ ID NO: 4702 - protein, 18 aa, synthetic construct
  VARIANT 1: note = A can be replaced by G
  VARIANT 2: note = T can be replaced by A, E, G, F, I, D, H, K, S, P, R, Q, Y, V, or L
  VARIANT 8: note = D can be replaced by G
  VARIANT 9: note = L can be replaced by M, I, E, A, V, D, H, G, F, K, R, P, S, T, or Y
  VARIANT 11: note = G can be replaced by F
  VARIANT 15: note = L can be replaced by V, or F
ATSTTVRDLCGIMYLYDY

SEQ ID NO: 4703 - protein, 288 aa, Homo sapiens
MQIPQAPWPVVWAVLQLGWRPGWFLDSPDRPWNPPTFSPALLVVTEGDNATFTCSFSNTSESFVLNWYRMSPSNQTDKLAAFPEDRSQPGQDCRFRVTQLPNGRDFHMSVVRARRNDSGTYLCGAISLAPKAQIKESLRAELRVTERRAEVPTAHPSPSPRPAGQFQTLVVGVVGGLLGSLVLLVWVLAVICSRAARGTIGARRTGQPLKEDPSAVPVFSVDYGELDFQWREKTPEPPVPCVPEQTEYATIVFPSGMGTSSPARRGSADGPRSAQPLRPEDGHCSWPL

SEQ ID NO: 4704 - protein, 10 aa, synthetic construct
  VARIANT 3: note = M can be replaced by V or T
GRMHSINAMA

SEQ ID NO: 4705 - protein, 10 aa, synthetic construct
  VARIANT 6: note = N can be replaced by F
LISWGNGITY

SEQ ID NO: 4706 - protein, 10 aa, synthetic construct
  VARIANT 5: note = S can be replaced by A
ESYGSSWYDS

SEQ ID NO: 4707 - protein, 10 aa, synthetic construct
  VARIANT 5: note = N can be replaced by E,S, or R
  VARIANT 9: note = I can be replaced by T
CLSSNGDRIN

SEQ ID NO: 4708 - protein, 18 aa, synthetic construct
  VARIANT 9: note = M can be replaced by L, V, or R
GTSTTVRDMCGIMYLYDY

SEQ ID NO: 4709 - protein, 604 aa, synthetic construct
DVQLVESGGGVVQPGGSLRLSCAASGTFFSIDSMAWYRQAPGKQRELVAAITGGGSPNYADSVKGRFTISSDVAKNTVYLQMNSLRPEDTALYYCNAEGQAGWGTALLDYWGQGTLVTVSSGGGGSEVQLVESGGGVVQPGGSLRLSCAASGTFFSIDSMAWYRQAPGKQRELVAAITGGGSPNYADSVKGRFTISSDVAKNTVYLQMNSLRPEDTALYYCNAEGQAGWGTALLDYWGQGTLVTVSSGGGGSEVQLVESGGGVVQPGGSLRLSCAASGTFFSIDSMAWYRQAPGKQRELVAAITGGGSPNYADSVKGRFTISSDVAKNTVYLQMNSLRPEDTALYYCNAEGQAGWGTALLDYWGQGTLVTVSSGGGGSDKTHTCPPCPAPEAAGGPSVFLFPPKPKDTLMISRTPEVTCVVVDVSHEDPEVKFNWYVDGVEVHNAKTKPREEQYNSTYRVVSVLTVLHQDWLNGKEYKCKVSNKALPAPIEKTISKAKGQPREPQVYTLPPCRDELTKNQVSLWCLVKGFYPSDIAVEWESNGQPENNYKTTPPVLDSDGSFFLYSKLTVDKSRWQQGNVFSCSVMHEALHNHYTQKSLSLSPG

SEQ ID NO: 4710 - protein, 490 aa, synthetic construct
DVQLVESGGGVVQPGGSLRLSCAASGFTLDYYVIGWFRQAPGKEREGVACLSSNGDRINYADSVKGRFTISRDIAKNTVYLQMNSLRPEDTALYHCAAGTSTTVRDMCGIMYLYDYWGQGTLVTVSSGGGGSEVQLVESGGGVVQPGGSLRLSCAASGFTLDYYVIGWFRQAPGKEREGVACLSSNGDRINYADSVKGRFTISRDIAKNTVYLQMNSLRPEDTALYHCAAGTSTTVRDMCGIMYLYDYWGQGTLVTVSSGGGGSDKTHTCPPCPAPEAAGGPSVFLFPPKPKDTLMISRTPEVTCVVVDVSHEDPEVKFNWYVDGVEVHNAKTKPREEQYNSTYRVVSVLTVLHQDWLNGKEYKCKVSNKALPAPIEKTISKAKGQPREPQVCTLPPSRDELTKNQVSLSCAVKGFYPSDIAVEWESNGQPENNYKTTPPVLDSDGSFFLVSKLTVDKSRWQQGNVFSCSVMHEALHNRFTQKSLSLSPG

SEQ ID NO: 4711 - protein, 744 aa, synthetic construct
DVQLVESGGGVVQPGGSLRLSCAASGRMHSINAMAWFRQAPGKEREFVALISWGNGITYYADSVKGRFTISRDNAKNTLYLQMNSLRPEDTALYYCAAESYGSSWYDSWGQGTLVTVSSGGGGSDKTHTCPPCPAPEAAGGPSVFLFPPKPKDTLMISRTPEVTCVVVDVSHEDPEVKFNWYVDGVEVHNAKTKPREEQYNSTYRVVSVLTVLHQDWLNGKEYKCKVSNKALPAPIEKTISKAKGQPREPQVYTLPPSRDELTKNQVSLTCLVKGFYPSDIAVEWESNGQPENNYKTTPPVLDSDGSFFLYSKLTVDKSRWQQGNVFSCSVMHEALHNHYTQKSLSLSPGGGGGSGGGGSGGGGSGGGGSEVQLVESGGGVVQPGGSLRLSCAASGTFFSIDSMAWYRQAPGKQRELVAAITGGGSPNYADSVKGRFTISSDVAKNTVYLQMNSLRPEDTALYYCNAEGQAGWGTALLDYWGQGTLVTVSSGGGGSEVQLVESGGGVVQPGGSLRLSCAASGTFFSIDSMAWYRQAPGKQRELVAAITGGGSPNYADSVKGRFTISSDVAKNTVYLQMNSLRPEDTALYYCNAEGQAGWGTALLDYWGQGTLVTVSSGGGGSEVQLVESGGGVVQPGGSLRLSCAASGTFFSIDSMAWYRQAPGKQRELVAAITGGGSPNYADSVKGRFTISSDVAKNTVYLQMNSLRPEDTALYYCNAEGQAGWGTALLDYWGQGTLVTVSSA

SEQ ID NO: 4712 - protein, 474 aa, synthetic construct
DVQLVESGGGVVQPGGSLRLSCAASGRMHSINAMAWFRQAPGKEREFVALISWGNGITYYADSVKGRFTISRDNAKNTLYLQMNSLRPEDTALYYCAAESYGSSWYDSWGQGTLVTVSSGGGGSEVQLVESGGGVVQPGGSLRLSCAASGRMHSINAMAWFRQAPGKEREFVALISWGNGITYYADSVKGRFTISRDNAKNTLYLQMNSLRPEDTALYYCAAESYGSSWYDSWGQGTLVTVSSGGGGSDKTHTCPPCPAPEAAGGPSVFLFPPKPKDTLMISRTPEVTCVVVDVSHEDPEVKFNWYVDGVEVHNAKTKPREEQYNSTYRVVSVLTVLHQDWLNGKEYKCKVSNKALPAPIEKTISKAKGQPREPQVCTLPPSRDELTKNQVSLSCAVKGFYPSDIAVEWESNGQPENNYKTTPPVLDSDGSFFLVSKLTVDKSRWQQGNVFSCSVMHEALHNRFTQKSLSLSPG

SEQ ID NO: 4713 - protein, 5 aa, synthetic construct
VTVSS

SEQ ID NO: 4714 - protein, 121 aa, synthetic construct
DVQLVESGGGVVQPGGSLRLSCAASGTFFSIDSMAWYRQAPGKQRELVAAITGGGSPNYADSVKGRFTISSDVAKNTVYLQMNSLRPEDTALYYCNAEGQAGWGTALLDYWGQGTLVTVSS

SEQ ID NO: 4715 - protein, 121 aa, synthetic construct
EVQLVESGGGVVQPGGSLRLSCAASGTFFSIDSMAWYRQAPGKQRELVAAITGGGSPNYADSVKGRFTISSDVAKNTVYLQMNSLRPEDTALYYCNAEGQAGWGTALLDYWGQGTLVTVSS

SEQ ID NO: 4716 - protein, 127 aa, synthetic construct
DVQLVESGGGVVQPGGSLRLSCAASGFTLDYYVIGWFRQAPGKEREGVACLSSNGDRINYADSVKGRFTISRDIAKNTVYLQMNSLRPEDTALYHCAAGTSTTVRDMCGIMYLYDYWGQGTLVTVSS

SEQ ID NO: 4717 - protein, 127 aa, synthetic construct; identical to SEQ ID NO: 331

SEQ ID NO: 4718 - protein, 119 aa, synthetic construct
DVQLVESGGGVVQPGGSLRLSCAASGRMHSINAMAWFRQAPGKEREFVALISWGNGITYYADSVKGRFTISRDNAKNTLYLQMNSLRPEDTALYYCAAESYGSSWYDSWGQGTLVTVSS

SEQ ID NO: 4719 - protein, 119 aa, synthetic construct; identical to SEQ ID NO: 3376

SEQ ID NO: 4720 - protein, 10 aa, synthetic construct
GTFFSIDSMA

SEQ ID NO: 4721 - protein, 9 aa, synthetic construct
AITGGGSPN

SEQ ID NO: 4722 - protein, 13 aa, synthetic construct
EGQAGWGTALLDY

SEQ ID NO: 4723 - protein, 10 aa, synthetic construct
GFTLDYYVIG

SEQ ID NO: 4724 - protein, 10 aa, synthetic construct
CLSSNGDRIN

SEQ ID NO: 4725 - protein, 18 aa, synthetic construct
GTSTTVRDMCGIMYLYDY

SEQ ID NO: 4726 - protein, 10 aa, synthetic construct
GRMHSINAMA

SEQ ID NO: 4727 - protein, 10 aa, synthetic construct
LISWGNGITY

SEQ ID NO: 4728 - protein, 9 aa, synthetic construct
SYGSSWYDS

SEQ ID NO: 4729 - protein, 4 aa, synthetic construct
GGGG

SEQ ID NO: 4730 - protein, 5 aa, synthetic construct
GGGGG

SEQ ID NO: 4731 - protein, 6 aa, synthetic construct
GGGGGG

SEQ ID NO: 4732 - protein, 7 aa, synthetic construct
GGGGGGG

SEQ ID NO: 4733 - protein, 8 aa, synthetic construct
GGGGGGGG

SEQ ID NO: 4734 - protein, 5 aa, synthetic construct
  VARIANT 1..5: note = GGGGS residues can be repeated one to five times
GGGGS

SEQ ID NO: 4735 - protein, 4 aa, synthetic construct
KERE

SEQ ID NO: 4736 - protein, 4 aa, synthetic construct
KQRE

SEQ ID NO: 4737 - protein, 4 aa, synthetic construct
GLEW

SEQ ID NO: 4738 - protein, 5 aa, synthetic construct
KEREL

SEQ ID NO: 4739 - protein, 5 aa, synthetic construct
KEREF

SEQ ID NO: 4740 - protein, 5 aa, synthetic construct
KQREL

SEQ ID NO: 4741 - protein, 5 aa, synthetic construct
KQREF

SEQ ID NO: 4742 - protein, 5 aa, synthetic construct
KEREG

SEQ ID NO: 4743 - protein, 5 aa, synthetic construct
KQREW

SEQ ID NO: 4744 - protein, 5 aa, synthetic construct
KQREG

SEQ ID NO: 4745 - protein, 4 aa, synthetic construct
TERE

SEQ ID NO: 4746 - protein, 5 aa, synthetic construct
TEREL

SEQ ID NO: 4747 - protein, 4 aa, synthetic construct
TQRE

SEQ ID NO: 4748 - protein, 5 aa, synthetic construct
TQREL

SEQ ID NO: 4749 - protein, 4 aa, synthetic construct
KECE

SEQ ID NO: 4750 - protein, 5 aa, synthetic construct
KECEL

SEQ ID NO: 4751 - protein, 5 aa, synthetic construct
KECER

SEQ ID NO: 4752 - protein, 4 aa, synthetic construct
KQCE

SEQ ID NO: 4753 - protein, 5 aa, synthetic construct
KQCEL

SEQ ID NO: 4754 - protein, 4 aa, synthetic construct
RERE

SEQ ID NO: 4755 - protein, 5 aa, synthetic construct
REREG

SEQ ID NO: 4756 - protein, 4 aa, synthetic construct
RQRE

SEQ ID NO: 4757 - protein, 5 aa, synthetic construct
RQREL

SEQ ID NO: 4758 - protein, 5 aa, synthetic construct
RQREF

SEQ ID NO: 4759 - protein, 5 aa, synthetic construct
RQREW

SEQ ID NO: 4760 - protein, 4 aa, synthetic construct
QERE

SEQ ID NO: 4761 - protein, 5 aa, synthetic construct
QEREG

SEQ ID NO: 4762 - protein, 4 aa, synthetic construct
QQRE

SEQ ID NO: 4763 - protein, 5 aa, synthetic construct
QQREW

SEQ ID NO: 4764 - protein, 5 aa, synthetic construct
QQREL

SEQ ID NO: 4765 - protein, 5 aa, synthetic construct
QQREF

SEQ ID NO: 4766 - protein, 4 aa, synthetic construct
KGRE

SEQ ID NO: 4767 - protein, 5 aa, synthetic construct
KGREG

SEQ ID NO: 4768 - protein, 4 aa, synthetic construct
KDRE

SEQ ID NO: 4769 - protein, 5 aa, synthetic construct
KDREV

SEQ ID NO: 4770 - protein, 5 aa, synthetic construct
DECKL

SEQ ID NO: 4771 - protein, 5 aa, synthetic construct
NVCEL

SEQ ID NO: 4772 - protein, 4 aa, synthetic construct
GVEW

SEQ ID NO: 4773 - protein, 4 aa, synthetic construct
EPEW

SEQ ID NO: 4774 - protein, 4 aa, synthetic construct
GLER

SEQ ID NO: 4775 - protein, 4 aa, synthetic construct
DQEW

SEQ ID NO: 4776 - protein, 4 aa, synthetic construct
DLEW

SEQ ID NO: 4777 - protein, 4 aa, synthetic construct
GIEW

SEQ ID NO: 4778 - protein, 4 aa, synthetic construct
ELEW

SEQ ID NO: 4779 - protein, 4 aa, synthetic construct
GPEW

SEQ ID NO: 4780 - protein, 4 aa, synthetic construct
EWLP

SEQ ID NO: 4781 - protein, 4 aa, synthetic construct
GPER

SEQ ID NO: 4782 - protein, 6 aa, synthetic construct
HHHHHH

SEQ ID NO: 4783 - protein, 10 aa, synthetic construct
AIVWPGFETY

SEQ ID NO: 4784 - protein, 10 aa, synthetic construct
AIVWPGDETY

SEQ ID NO: 4785 - protein, 10 aa, synthetic construct
AIVWPDGETY

SEQ ID NO: 4786 - protein, 10 aa, synthetic construct
AIPWPGGETY

SEQ ID NO: 4787 - protein, 10 aa, synthetic construct
AILWPGGETY

SEQ ID NO: 4788 - protein, 10 aa, synthetic construct
VISSSGAHED

SEQ ID NO: 4789 - protein, 10 aa, synthetic construct
VISSSGAHEL

SEQ ID NO: 4790 - protein, 10 aa, synthetic construct
VISSSGAHEV

SEQ ID NO: 4791 - protein, 10 aa, synthetic construct
VISSSGHHEW

SEQ ID NO: 4792 - protein, 10 aa, synthetic construct
VISSSGRHEW

SEQ ID NO: 4793 - protein, 14 aa, synthetic construct
WFRQAPGKERKGVA

SEQ ID NO: 4794 - protein, 14 aa, synthetic construct
RFRQAPGKEREGVA

SEQ ID NO: 4795 - protein, 5 aa, synthetic construct
  VARIANT 1..5: note = The entire sequence of amino acids 1-5 can be repeated one or more times
GGGGS

SEQ ID NO: 4796 - protein, 4 aa, synthetic construct
  VARIANT 4: note = A residue can be repeated up to six times
  VARIANT 1..4: note = A can be replaced by G, V, L, I
AAAA